(19) United States
(12) Patent Application Publication
(10) Pub. No.: US 2026/0191916 A1
(43) Pub. Date: Jul. 9, 2026

(54) MICROBIAL CONSORTIA

(71) Applicant: Kanvas Biosciences, Inc., Monmouth Junction, NJ (US)

(72) Inventors: James BERLEMAN, Monmouth Junction, NJ (US); Aditya BHALLA, Monmouth Junction, NJ (US); Philip BURNHAM, Monmouth Junction, NJ (US); Matthew CHENG, Monmouth Junction, NJ (US); Peter DIEBOLD, Monmouth Junction, NJ (US); Anjali DOSHI, Monmouth Junction, NJ (US); Kyle JACOBY, Monmouth Junction, NJ (US); Hao SHI, Monmouth Junction, NJ (US); Lee SWEM, Monmouth Junction, NJ (US)

(73) Assignee: Kanvas Biosciences, Inc., Monmouth Junction, NJ (US)

(21) Appl. No.: 19/381,263

(22) Filed: Nov. 6, 2025

Related U.S. Application Data
(63) Continuation of application No. PCT/US2025/054096, filed on Nov. 5, 2025.
(60) Provisional application No. 63/716,540, filed on Nov. 5, 2024.
(60) Provisional application No. 63/740,454, filed on Dec. 31, 2024.

(51) Int. Cl. A61K 35/741; A61K 9/00; A61K 9/10; A61K 47/10; A61P 35/04; C12N 1/20; C12R 1/01

(52) U.S. Cl. CPC A61K 35/741; A61K 9/0053; A61K 9/10; A61K 47/10; A61P 35/04; C12N 1/20; C12R 2001/01

(57) ABSTRACT

The present disclosure provides microbial consortia that are useful as therapeutics, for example, for treating cancer and/or reducing tumor volume or tumor growth in patients.

### CROSS-REFERENCE TO RELATED APPLICATION

[0001] This application is a Continuation Application of International Patent Application No. PCT/US2025/054096, filed Nov. 5, 2025, which claims priority to U.S. Provisional Application No. 63/716,540, filed Nov. 5, 2024, and U.S. Provisional Application No. 63/740,454, filed Dec. 31, 2024, the contents of each of which are hereby incorporated by reference in their entirety, and to each of which priority is claimed.

### SEQUENCE LISTING

[0002] The specification further incorporates by reference the Sequence Listing submitted herewith via mail on Mar. 26, 2026. Pursuant to 37 C.F.R. §§ 1.831-1.185 and 1.839, the Sequence Listing xml file, identified as 0915920179, is 239,042,560 bytes and was created on Mar. 26, 2026. The Sequence Listing does not extend beyond the scope of the specification and thus does not contain new matter.

### BACKGROUND

[0003] Studies have demonstrated that the composition of the microbiome can impact patient health across various conditions, including the existence of, or vulnerability to, infectious diseases, autoimmune disorders, and gastrointestinal issues and conditions such as inflammatory bowel disease. Furthermore, introducing favorable microbiomes to patients can produce positive effects for a variety of therapeutic and prophylactic purposes. The present disclosure provides microbial consortia that are useful as therapeutics, for example, for treating cancer and/or reducing tumor volume or tumor growth in patients.

### SUMMARY

[0004] The present disclosure provides microbial consortia useful as therapeutics for treating cancer and/or reducing tumor volume or tumor growth in patients.

[0005] In certain non-limiting embodiments, the present disclosure provides a microbial consortium comprising or consisting of:
[0006] (a) Ruminococcus FBI01839, Parabacteroides distasonis, Blautia caecimuris, Longibaculum muris, Blautia massiliensis, Alistipes putredinis, Akkermansia muciniphila, Faecalimonas umbilicata, Clostridium scindens, Bacteroides cellulosilyticus, Eggerthella lenta, Monoglobus pectinilyticus, Gordonibacter urolithinfaciens, Bacteroides ovatus, Bacteroides thetaiotaomicron, Bacteroides uniformis, Phocaeicola dorei, Thomasclavelia ramosa, Lactonifactor FBI02339, UBA1417 FBI02365, Alistipes onderdonkii, Veillonella atypica, Raoultibacter massiliensis, Flavonifractor plautii, Extibacter hylemonae, Odoribacter FBI02593, Bacteroides stercoris, Enterocloster clostridioformis, Hungatella hathewayii, Scatavimonas FBI02887, Ruminococcus gnavus, Enterocloster bolteae, Blautia FBI02891, Bacteroides finegoldii, Luoshenia tenuis, Bacteroides caccae, Phocaeicola vulgatus, Parabacteroides merdae, Lacticaseibacillus paracasei, Oliverpabstia intestinalis, Faecalibacterium prausnitzii, Bifidobacterium longum, Bifidobacterium bifidum, Lawsonibacter asaccharolyticus, Bifidobacterium dentium, and Veillonella atypica; or
[0007] (b) FBI01839, FBI01840, FBI01848, FBI01859, FBI01876, FBI01883, FBI01900, FBI01907, FBI01925, FBI01930, FBI01952, FBI01956, FBI01957, FBI02069, FBI02074, FBI02083, FBI02111, FBI02144, FBI02305, FBI02339, FBI02365, FBI02408, FBI02412, FBI02417, FBI02538, FBI02555, FBI02593, FBI02695, FBI02882, FBI02884, FBI02887, FBI02888, FBI02890, FBI02891, FBI02893, FBI02894, FBI02895, FBI02896, FBI02897, FBI02898, FBI02899, FBI02900, FBI02902, FBI02903, FBI02904, FBI02905, FBI02906, and FBI02908.

[0008] In certain non-limiting embodiments, the present disclosure provides a microbial consortium comprising or consisting of:
[0009] (a) Ruminococcus FBI01839, Parabacteroides distasonis, Blautia caecimuris, Longibaculum muris, Streptococcus salivarius, Blautia wexlerae FBI01866, Blautia massiliensis, Alistipes putredinis, Akkermansia muciniphila, Faecalimonas umbilicata, Clostridium scindens, Bacteroides cellulosilyticus, Eggerthella lenta, Monoglobus pectinilyticus, Gordonibacter urolithinfaciens, Bacteroides ovatus, Bacteroides thetaiotaomicron, Bacteroides uniformis FBI02083, Enterococcus avium, Streptococcus mutans, Bacteroides uniformis FBI02111, Phocaeicola dorei, Streptococcus parasanguinis, Streptococcus FBI02176, Streptococcus parasanguinis, Enterococcus gallinarum, Streptococcus gallolyticus, Thomasclavelia ramose, Bacteroides thetaiotaomicron, Lactonifactor FBI02339, UBA1417 FBI02365, Alistipes onderdonkii, Veillonella atypica FBI02412, Extibacter hylemonae, Odoribacter FBI02593, and Bacteroides stercoris; or
[0010] (b) FBI01839, FBI01840, FBI01848, FBI01859, FBI01863, FBI01866, FBI01876, FBI01883, FBI01900, FBI01907, FBI01925, FBI01930, FBI01952, FBI01956, FBI01957, FBI02069, FBI02074, FBI02083, FBI02101, FBI02106, FBI02111, FBI02144, FBI02158, FBI02176, FBI02208, FBI02271, FBI02288, FBI02305, FBI02325, FBI02339, FBI02365, FBI02408, FBI02412, FBI02555, FBI02593, and FBI02695.

[0011] In certain non-limiting embodiments, the present disclosure provides a microbial consortium comprising or consisting of:
[0012] (a) Ruminococcus FBI01839, Parabacteroides distasonis, Blautia caecimuris, Longibaculum muris, Streptococcus salivarius, Blautia wexlerae FBI01866, Blautia massiliensis, Alistipes putredinis, Akkermansia muciniphila, Faecalimonas umbilicate, Clostridium scindens, Bacteroides cellulosilyticus, Eggerthella lenta, Monoglobus pectinilyticus, Gordonibacter urolithinfaciens, Bacteroides ovatus, Bacteroides thetaiotaomicron, Bacteroides uniformis FBI02083, Enterococcus avium, Streptococcus mutans, Bacteroides uniformis FBI02111, Phocaeicola dorei, Streptococcus parasanguinis, Streptococcus FBI02176, Streptococcus parasanguinis, Enterococcus gallinarum, Streptococcus gallolyticus, Thomasclavelia ramosa, Bacteroides thetaiotaomicron, Lactonifactor FBI02339, UBA1417 FBI02365, Alistipes onderdonkii, Veillonella atypica FBI02412, Raoultibacter massiliensis, Flavonifractor plautii, Extibacter hylemonae, Odoribacter FBI02593, and Bacteroides stercoris; or
[0013] (b) FBI01839, FBI01840, FBI01848, FBI01859, FBI01863, FBI01866, FBI01876, FBI01883, FBI01900, FBI01907, FBI01925, FBI01930, FBI01952, FBI01956, FBI01957, FBI02069, FBI02074, FBI02083, FBI02101, FBI02106, FBI02111, FBI02144, FBI02158, FBI02176, FBI02208, FBI02271, FBI02288, FBI02305, FBI02325, FBI02339, FBI02365, FBI02408, FBI02412, FBI02417, FBI02538, FBI02555, FBI02593, and FBI02695.

[0014] In certain non-limiting embodiments, the present disclosure provides a microbial consortium comprising or consisting of:
[0015] (a) Ruminococcus FBI01839, Parabacteroides distasonis, Blautia caecimuris, Longibaculum muris, Blautia massiliensis, Alistipes putredinis, Akkermansia muciniphila, Faecalimonas umbilicata, Clostridium scindens, Bacteroides cellulosilyticus, Eggerthella lenta, Monoglobus pectinilyticus, Gordonibacter urolithinfaciens, Bacteroides ovatus, Bacteroides thetaiotaomicron, Bacteroides uniformis FBI02083, Bacteroides uniformis FBI02111, Phocaeicola dorei, Thomasclavelia ramosa, Bacteroides thetaiotaomicron, Lactonifactor FBI02339, UBA1417 FBI02365, Alistipes onderdonkii, Veillonella atypica FBI02412, Raoultibacter massiliensis, Flavonifractor plautii, Extibacter hylemonae, Odoribacter FBI02593, and Bacteroides stercoris; or
[0016] (b) FBI01839, FBI01840, FBI01848, FBI01859, FBI01876, FBI01883, FBI01900, FBI01907, FBI01925, FBI01930, FBI01952, FBI01956, FBI01957, FBI02069, FBI02074, FBI02083, FBI02111, FBI02144, FBI02305, FBI02325, FBI02339, FBI02365, FBI02408, FBI02412, FBI02417, FBI02538, FBI02555, FBI02593, and FBI02695.

[0017] In certain non-limiting embodiments, the present disclosure provides a microbial consortium comprising or consisting of:
[0018] (a) Ruminococcus FBI01839, Parabacteroides distasonis, Blautia caecimuris, Longibaculum muris, Blautia massiliensis, Alistipes putredinis, Akkermansia muciniphila, Faecalimonas umbilicata, Clostridium scindens, Bacteroides cellulosilyticus, Eggerthella lenta, Monoglobus pectinilyticus, Gordonibacter urolithinfaciens, Bacteroides ovatus, Bacteroides thetaiotaomicron, Bacteroides uniformis FBI02083, Bacteroides uniformis FBI02111, Phocaeicola dorei, Thomasclavelia ramosa, Bacteroides thetaiotaomicron, Lactonifactor FBI02339, UBA1417 FBI02365, Alistipes onderdonkii, Veillonella atypica FBI02412, Raoultibacter massiliensis, Flavonifractor plautii, Extibacter hylemonae, Odoribacter FBI02593, Bacteroides stercoris, and Faecalibacterium prausnitzii; or
[0019] (b) FBI01839, FBI01840, FBI01848, FBI01859, FBI01876, FBI01883, FBI01900, FBI01907, FBI01925, FBI01930, FBI01952, FBI01956, FBI01957, FBI02069, FBI02074, FBI02083, FBI02111, FBI02144, FBI02305, FBI02325, FBI02339, FBI02365, FBI02408, FBI02412, FBI02417, FBI02538, FBI02555, FBI02593, FBI02695, and FBI02902.

[0020] In certain non-limiting embodiments, the present disclosure provides a microbial consortium comprising or consisting of:
[0021] (a) Ruminococcus FBI01839, Parabacteroides distasonis, Blautia caecimuris, Longibaculum muris, Blautia massiliensis, Alistipes putredinis, Akkermansia muciniphila, Faecalimonas umbilicata, Clostridium scindens, Bacteroides cellulosilyticus, Eggerthella lenta, Monoglobus pectinilyticus, Gordonibacter urolithinfaciens, Bacteroides ovatus, Bacteroides thetaiotaomicron, Bacteroides uniformis FBI02083, Bacteroides uniformis FBI02111, Phocaeicola dorei, Thomasclavelia ramosa, Bacteroides thetaiotaomicron, Lactonifactor FBI02339, UBA1417 FBI02365, Alistipes onderdonkii, Veillonella atypica FBI02412, Raoultibacter massiliensis, Flavonifractor plautii, Extibacter hylemonae, Odoribacter FBI02593, Bacteroides stercoris, Blautia wexlerae FBI01861, Enterocloster clostridioformis, Hungatella hathewayii, Scatavimonas FBI02887, Ruminococcus gnavus, Enterocloster bolteae, Blautia FBI02891, Bacteroides finegoldii, Luoshenia tenuis, Bacteroides caccae, Phocaeicola vulgatus, Parabacteroides merdae, Lacticaseibacillus paracasei, Oliverpabstia intestinalis, Faecalibacterium prausnitzii, Bifidobacterium longum, Bifidobacterium bifidum, Lawsonibacter asaccharolyticus, Bifidobacterium dentium, Veillonella atypica FBI02908, and Enterococcus avium; or
[0022] (b) FBI01839, FBI01840, FBI01848, FBI01859, FBI01861, FBI01876, FBI01883, FBI01900, FBI01907, FBI01925, FBI01930, FBI01952, FBI01956, FBI01957, FBI02069, FBI02074, FBI02083, FBI02111, FBI02144, FBI02305, FBI02325, FBI02339, FBI02365, FBI02408, FBI02412, FBI02417, FBI02538, FBI02555, FBI02593, FBI02695, FBI02882, FBI02884, FBI02887, FBI02888, FBI02890, FBI02891, FBI02893, FBI02894, FBI02895, FBI02896, FBI02897, FBI02898, FBI02899, FBI02900, FBI02902, FBI02903, FBI02904, FBI02905, FBI02906, FBI02908, and FBI02101.

[0023] In certain non-limiting embodiments, the present disclosure provides a microbial consortium comprising or consisting of the species listed in Consortia 5.1 in Table 3.

[0024] In certain non-limiting embodiments, the present disclosure provides a microbial consortium comprising or consisting of the bacterial strains listed in Consortia 5.1 in Table 3.

[0025] In certain non-limiting embodiments, the present disclosure provides a microbial consortium comprising or consisting of:
[0026] (a) Ruminococcus FBI01839, Parabacteroides distasonis, Blautia caecimuris, Longibaculum muris, Blautia wexlerae, Blautia massiliensis, Alistipes putredinis, Akkermansia muciniphila, Faecalimonas umbilicata, Clostridium scindens, Bacteroides cellulosilyticus, Eggerthella lenta, Monoglobus pectinilyticus, Gordonibacter urolithinfaciens, Bacteroides ovatus, Bacteroides thetaiotaomicron, Bacteroides uniformis, Phocaeicola dorei, Thomasclavelia ramosa, Lactonifactor FBI02339, UBA1417 FBI02365, Alistipes onderdonkii, Veillonella atypica, Raoultibacter massiliensis, Flavonifractor plautii, Extibacter hylemonae, Odoribacter FBI02593, Bacteroides stercoris, Enterocloster clostridioformis, Hungatella hathewayii, Scatavimonas FBI02887, Ruminococcus gnavus, Enterocloster bolteae, Blautia FBI02891, Bacteroides finegoldii, Luoshenia tenuis, Bacteroides caccae, Phocaeicola vulgatus, Parabacteroides merdae, Lacticaseibacillus paracasei, Oliverpabstia intestinalis, Faecalibacterium prausnitzii, Bifidobacterium longum, Bifidobacterium bifidum, Lawsonibacter asaccharolyticus, Bifidobacterium dentium, and Veillonella atypica; or
[0027] (b) FBI01839, FBI01840, FBI01848, FBI01859, FBI01861, FBI01876, FBI01883, FBI01900, FBI01907, FBI01925, FBI01930, FBI01952, FBI01956, FBI01957, FBI02069, FBI02074, FBI02083, FBI02111, FBI02144, FBI02305, FBI02325, FBI02339, FBI02365, FBI02408, FBI02412, FBI02417, FBI02538, FBI02555, FBI02593, FBI02695, FBI02882, FBI02884, FBI02887, FBI02888, FBI02890, FBI02891, FBI02893, FBI02894, FBI02895, FBI02896, FBI02897, FBI02898, FBI02899, FBI02900, FBI02902, FBI02903, FBI02904, FBI02905, FBI02906, and FBI02908.

[0028] In certain non-limiting embodiments, the present disclosure provides a microbial consortium comprising or consisting of the species listed in Consortia 6.1 in Table 3.

[0029] In certain non-limiting embodiments, the present disclosure provides a microbial consortium comprising or consisting of the bacterial strains listed in Consortia 6.1 in Table 3.

[0030] In certain non-limiting embodiments, the present disclosure provides a microbial consortium comprising or consisting of the species listed in Consortia 6.2 in Table 3.

[0031] In certain non-limiting embodiments, the present disclosure provides a microbial consortium comprising or consisting of the bacterial strains listed in Consortia 6.2 in Table 3.

[0032] In certain non-limiting embodiments, the present disclosure provides a microbial consortium comprising or consisting of:
[0033] (a) at least 39 bacterial strains selected from the group consisting of FBI01839, FBI01840, FBI01848, FBI01859, FBI01876, FBI01883, FBI01900, FBI01907, FBI01925, FBI01930, FBI01952, FBI01956, FBI01957, FBI02069, FBI02074, FBI02083, FBI02111, FBI02144, FBI02305, FBI02339, FBI02365, FBI02408, FBI02412, FBI02417, FBI02538, FBI02555, FBI02593, FBI02695, FBI02882, FBI02884, FBI02887, FBI02888, FBI02890, FBI02891, FBI02893, FBI02894, FBI02895, FBI02896, FBI02897, FBI02898, FBI02899, FBI02900, FBI02902, FBI02903, FBI02904, FBI02905, FBI02906, and FBI02908;
[0034] (b) at least 29 bacterial strains selected from the group consisting of FBI01839, FBI01840, FBI01848, FBI01859, FBI01863, FBI01866, FBI01876, FBI01883, FBI01900, FBI01907, FBI01925, FBI01930, FBI01952, FBI01956, FBI01957, FBI02069, FBI02074, FBI02083, FBI02101, FBI02106, FBI02111, FBI02144, FBI02158, FBI02176, FBI02208, FBI02271, FBI02288, FBI02305, FBI02325, FBI02339, FBI02365, FBI02408, FBI02412, FBI02555, FBI02593, and FBI02695;
[0035] (c) at least 30 bacterial strains selected from the group consisting of FBI01839, FBI01840, FBI01848, FBI01859, FBI01863, FBI01866, FBI01876, FBI01883, FBI01900, FBI01907, FBI01925, FBI01930, FBI01952, FBI01956, FBI01957, FBI02069, FBI02074, FBI02083, FBI02101, FBI02106, FBI02111, FBI02144, FBI02158, FBI02176, FBI02208, FBI02271, FBI02288, FBI02305, FBI02325, FBI02339, FBI02365, FBI02408, FBI02412, FBI02417, FBI02538, FBI02555, FBI02593, and FBI02695;
[0036] (d) at least 23 bacterial strains selected from the group consisting of FBI01839, FBI01840, FBI01848, FBI01859, FBI01876, FBI01883, FBI01900, FBI01907, FBI01925, FBI01930, FBI01952, FBI01956, FBI01957, FBI02069, FBI02074, FBI02083, FBI02111, FBI02144, FBI02305, FBI02325, FBI02339, FBI02365, FBI02408, FBI02412, FBI02417, FBI02538, FBI02555, FBI02593, and FBI02695;
[0037] (e) at least 24 bacterial strains selected from the group consisting of FBI01839, FBI01840, FBI01848, FBI01859, FBI01876, FBI01883, FBI01900, FBI01907, FBI01925, FBI01930, FBI01952, FBI01956, FBI01957, FBI02069, FBI02074, FBI02083, FBI02111, FBI02144, FBI02305, FBI02325, FBI02339, FBI02365, FBI02408, FBI02412, FBI02417, FBI02538, FBI02555, FBI02593, FBI02695, and FBI02902;
[0038] (f) at least 40 bacterial strains selected from the group consisting of FBI01839, FBI01840, FBI01848, FBI01859, FBI01861, FBI01876, FBI01883, FBI01900, FBI01907, FBI01925, FBI01930, FBI01952, FBI01956, FBI01957, FBI02069, FBI02074, FBI02083, FBI02101, FBI02111, FBI02144, FBI02305, FBI02325, FBI02339, FBI02365, FBI02408, FBI02412, FBI02417, FBI02538, FBI02555, FBI02593, FBI02695, FBI02882, FBI02884, FBI02887, FBI02888, FBI02890, FBI02891, FBI02893, FBI02894, FBI02895, FBI02896, FBI02897, FBI02898, FBI02899, FBI02900, FBI02902, FBI02903, FBI02904, FBI02905, FBI02906, and FBI02908;
[0039] (g) at least 40 bacterial strains selected from the group consisting of FBI01839, FBI01840, FBI01848, FBI01859, FBI01861, FBI01876, FBI01883, FBI01900, FBI01907, FBI01925, FBI01930, FBI01952, FBI01956, FBI01957, FBI02069, FBI02074, FBI02083, FBI02111, FBI02144, FBI02305, FBI02325, FBI02339, FBI02365, FBI02408, FBI02412, FBI02417, FBI02538, FBI02555, FBI02593, FBI02695, FBI02882, FBI02884, FBI02887, FBI02888, FBI02890, FBI02891, FBI02893, FBI02894, FBI02895, FBI02896, FBI02897, FBI02898, FBI02899, FBI02900, FBI02902, FBI02903, FBI02904, FBI02905, FBI02906, and FBI02908;
[0040] (h) at least 39 bacterial strains selected from the bacterial strains listed in Consortia 6.2 in Table 3;
[0041] (i) at least 40 bacterial strains selected from the bacterial strains listed in Consortia 6.1 in Table 3; or
[0042] (j) at least 40 bacterial strains selected from the bacterial strains listed in Consortia 5.1 in Table 3.

[0043] In certain non-limiting embodiments, the present disclosure provides a microbial consortium comprising or consisting of bacterial strains set forth in Table 3.

[0044] In certain non-limiting embodiments, the present disclosure provides a microbial consortium comprising or consisting of bacterial strains set forth in Consortia 1 of Table 3.

[0045] In certain non-limiting embodiments, the present disclosure provides a microbial consortium comprising or consisting of bacterial strains set forth in Consortia 2 of Table 3.

[0046] In certain non-limiting embodiments, the present disclosure provides a microbial consortium comprising or consisting of bacterial strains set forth in Consortia 3 of Table 3.

[0047] In certain non-limiting embodiments, the present disclosure provides a microbial consortium comprising or consisting of bacterial strains set forth in Consortia 4 of Table 3.

[0048] In certain non-limiting embodiments, the present disclosure provides a microbial consortium comprising or consisting of bacterial strains set forth in Consortia 5 of Table 3.

[0049] In certain non-limiting embodiments, the present disclosure provides a microbial consortium comprising or consisting of bacterial strains set forth in Consortia 6 of Table 3.

[0050] In certain non-limiting embodiments, the present disclosure provides a microbial consortium comprising or consisting of bacterial strains set forth in Consortia 7 of Table 3.

[0051] In certain non-limiting embodiments, the present disclosure provides a microbial consortium comprising or consisting of the microbial species set forth in Consortia 1 of Table 3.

[0052] In certain non-limiting embodiments, the present disclosure provides a microbial consortium comprising or consisting of the microbial species set forth in Consortia 2 of Table 3.

[0053] In certain non-limiting embodiments, the present disclosure provides a microbial consortium comprising or consisting of the microbial species set forth in Consortia 3 of Table 3.

[0054] In certain non-limiting embodiments, the present disclosure provides a microbial consortium comprising or consisting of the microbial species set forth in Consortia 4 of Table 3.

[0055] In certain non-limiting embodiments, the present disclosure provides a microbial consortium comprising or consisting of the microbial species set forth in Consortia 5 of Table 3.

[0056] In certain non-limiting embodiments, the present disclosure provides a microbial consortium comprising or consisting of the microbial species set forth in Consortia 6 of Table 3.

[0057] In certain non-limiting embodiments, the present disclosure provides a microbial consortium comprising or consisting of the microbial species set forth in Consortia 7 of Table 3.

[0058] In certain non-limiting embodiments, the present disclosure provides a microbial consortium comprising or consisting of bacterial strains having identical functions or substantially identical functions to the strains of the microbial consortium disclosed herein.

[0059] In certain non-limiting embodiments, the present disclosure provides a microbial consortium comprising or consisting of bacterial strains having identical functions or substantially identical functions to the bacterial strains set forth in Consortia 1 of Table 3.

[0060] In certain non-limiting embodiments, the present disclosure provides a microbial consortium comprising or consisting of bacterial strains having identical functions or substantially identical functions to the bacterial strains set forth in Consortia 2 of Table 3.

[0061] In certain non-limiting embodiments, the present disclosure provides a microbial consortium comprising or consisting of bacterial strains having identical functions or substantially identical functions to the bacterial strains set forth in Consortia 3 of Table 3.

[0062] In certain non-limiting embodiments, the present disclosure provides a microbial consortium comprising or consisting of bacterial strains having identical functions or substantially identical functions to the bacterial strains set forth in Consortia 4 of Table 3.

[0063] In certain non-limiting embodiments, the present disclosure provides a microbial consortium comprising or consisting of bacterial strains having identical functions or substantially identical functions to the bacterial strains set forth in Consortia 5 of Table 3.

[0064] In certain non-limiting embodiments, the present disclosure provides a microbial consortium comprising or consisting of bacterial strains having identical functions or substantially identical functions to the bacterial strains set forth in Consortia 6 of Table 3.

[0065] In certain non-limiting embodiments, the present disclosure provides a microbial consortium comprising or consisting of bacterial strains having identical functions or substantially identical functions to the bacterial strains set forth in Consortia 7 of Table 3.

[0066] In certain non-limiting embodiments, the present disclosure provides a microbial consortium comprising or consisting of bacterial strains having identical functions or substantially identical functions to the microbial species set forth in Consortia 1 of Table 3.

[0067] In certain non-limiting embodiments, the present disclosure provides a microbial consortium comprising or consisting of bacterial strains having identical functions or substantially identical functions to the microbial species set forth in Consortia 2 of Table 3.

[0068] In certain non-limiting embodiments, the present disclosure provides a microbial consortium comprising or consisting of bacterial strains having identical functions or substantially identical functions to the microbial species set forth in Consortia 3 of Table 3.

[0069] In certain non-limiting embodiments, the present disclosure provides a microbial consortium comprising or consisting of bacterial strains having identical functions or substantially identical functions to the microbial species set forth in Consortia 4 of Table 3.

[0070] In certain non-limiting embodiments, the present disclosure provides a microbial consortium comprising or consisting of bacterial strains having identical functions or substantially identical functions to the microbial species set forth in Consortia 5 of Table 3.

[0071] In certain non-limiting embodiments, the present disclosure provides a microbial consortium comprising or consisting of bacterial strains having identical functions or substantially identical functions to the microbial species set forth in Consortia 6 of Table 3.

[0072] In certain non-limiting embodiments, the present disclosure provides a microbial consortium comprising or consisting of bacterial strains having identical functions or substantially identical functions to the microbial species set forth in Consortia 7 of Table 3.

[0073] In certain non-limiting embodiments, the present disclosure provides a microbial consortium comprising or consisting of bacterial strains functionally equivalent or metabolically equivalent to the strains of the microbial consortium disclosed herein.

[0074] In certain non-limiting embodiments, the present disclosure provides a microbial consortium comprising or consisting of bacterial strains functionally equivalent or metabolically equivalent to the bacterial strains set forth in Consortia 1 of Table 3.

[0075] In certain non-limiting embodiments, the present disclosure provides a microbial consortium comprising or consisting of bacterial strains functionally equivalent or metabolically equivalent to the bacterial strains set forth in Consortia 2 of Table 3.

[0076] In certain non-limiting embodiments, the present disclosure provides a microbial consortium comprising or consisting of bacterial strains functionally equivalent or metabolically equivalent to the bacterial strains set forth in Consortia 3 of Table 3.

[0077] In certain non-limiting embodiments, the present disclosure provides a microbial consortium comprising or consisting of bacterial strains functionally equivalent or metabolically equivalent to the bacterial strains set forth in Consortia 4 of Table 3.

[0078] In certain non-limiting embodiments, the present disclosure provides a microbial consortium comprising or consisting of bacterial strains functionally equivalent or metabolically equivalent to the bacterial strains set forth in Consortia 5 of Table 3.

[0079] In certain non-limiting embodiments, the present disclosure provides a microbial consortium comprising or consisting of bacterial strains functionally equivalent or metabolically equivalent to the bacterial strains set forth in Consortia 6 of Table 3.

[0080] In certain non-limiting embodiments, the present disclosure provides a microbial consortium comprising or consisting of bacterial strains functionally equivalent or metabolically equivalent to the bacterial strains set forth in Consortia 7 of Table 3.

[0081] In certain non-limiting embodiments, the present disclosure provides a microbial consortium comprising or consisting of bacterial strains functionally equivalent or metabolically equivalent to the microbial species set forth in Consortia 1 of Table 3.

[0082] In certain non-limiting embodiments, the present disclosure provides a microbial consortium comprising or consisting of bacterial strains functionally equivalent or metabolically equivalent to the microbial species set forth in Consortia 2 of Table 3.

[0083] In certain non-limiting embodiments, the present disclosure provides a microbial consortium comprising or consisting of bacterial strains functionally equivalent or metabolically equivalent to the microbial species set forth in Consortia 3 of Table 3.

[0084] In certain non-limiting embodiments, the present disclosure provides a microbial consortium comprising or consisting of bacterial strains functionally equivalent or metabolically equivalent to the microbial species set forth in Consortia 4 of Table 3.

[0085] In certain non-limiting embodiments, the present disclosure provides a microbial consortium comprising or consisting of bacterial strains functionally equivalent or metabolically equivalent to the microbial species set forth in Consortia 5 of Table 3.

[0086] In certain non-limiting embodiments, the present disclosure provides a microbial consortium comprising or consisting of bacterial strains functionally equivalent or metabolically equivalent to the microbial species set forth in Consortia 6 of Table 3.

[0087] In certain non-limiting embodiments, the present disclosure provides a microbial consortium comprising or consisting of bacterial strains functionally equivalent or metabolically equivalent to the microbial species set forth in Consortia 7 of Table 3.

[0088] In certain non-limiting embodiments, the present disclosure provides a microbial consortium comprising or consisting of bacterial strains producing the same metabolites or substantially the same metabolites as the strains of the microbial consortium disclosed herein.

[0089] In certain non-limiting embodiments, the present disclosure provides a microbial consortium comprising or consisting of bacterial strains producing the same metabolites or substantially the same metabolites as the bacterial strains set forth in Consortia 1 of Table 3.

[0090] In certain non-limiting embodiments, the present disclosure provides a microbial consortium comprising or consisting of bacterial strains producing the same metabolites or substantially the same metabolites as the bacterial strains set forth in Consortia 2 of Table 3.

[0091] In certain non-limiting embodiments, the present disclosure provides a microbial consortium comprising or consisting of bacterial strains producing the same metabolites or substantially the same metabolites as the bacterial strains set forth in Consortia 3 of Table 3.

[0092] In certain non-limiting embodiments, the present disclosure provides a microbial consortium comprising or consisting of bacterial strains producing the same metabolites or substantially the same metabolites as the bacterial strains set forth in Consortia 4 of Table 3.

[0093] In certain non-limiting embodiments, the present disclosure provides a microbial consortium comprising or consisting of bacterial strains producing the same metabolites or substantially the same metabolites as the bacterial strains set forth in Consortia 5 of Table 3.

[0094] In certain non-limiting embodiments, the present disclosure provides a microbial consortium comprising or consisting of bacterial strains producing the same metabolites or substantially the same metabolites as the bacterial strains set forth in Consortia 6 of Table 3.

[0095] In certain non-limiting embodiments, the present disclosure provides a microbial consortium comprising or consisting of bacterial strains producing the same metabolites or substantially the same metabolites as the bacterial strains set forth in Consortia 7 of Table 3.

[0096] In certain non-limiting embodiments, the present disclosure provides a microbial consortium comprising or consisting of bacterial strains producing the same metabolites or substantially the same metabolites as the microbial species set forth in Consortia 1 of Table 3.

[0097] In certain non-limiting embodiments, the present disclosure provides a microbial consortium comprising or consisting of bacterial strains producing the same metabolites or substantially the same metabolites as the microbial species set forth in Consortia 2 of Table 3.

[0098] In certain non-limiting embodiments, the present disclosure provides a microbial consortium comprising or consisting of bacterial strains producing the same metabolites or substantially the same metabolites as the microbial species set forth in Consortia 3 of Table 3.

[0099] In certain non-limiting embodiments, the present disclosure provides a microbial consortium comprising or consisting of bacterial strains producing the same metabolites or substantially the same metabolites as the microbial species set forth in Consortia 4 of Table 3.

[0100] In certain non-limiting embodiments, the present disclosure provides a microbial consortium comprising or consisting of bacterial strains producing the same metabolites or substantially the same metabolites as the microbial species set forth in Consortia 5 of Table 3.

[0101] In certain non-limiting embodiments, the present disclosure provides a microbial consortium comprising or consisting of bacterial strains producing the same metabolites or substantially the same metabolites as the microbial species set forth in Consortia 6 of Table 3.

[0102] In certain non-limiting embodiments, the present disclosure provides a microbial consortium comprising or consisting of bacterial strains producing the same metabolites or substantially the same metabolites as the microbial species set forth in Consortia 7 of Table 3.

[0103] In certain embodiments, each strain of a consortia described herein comprises a 16s RNA that is at least 80% identical to a nucleotide sequence selected from SEQ ID NOs: 1-720. In certain embodiments, each strain of Consortia 1, 2, 3, 4, 5, 6, or 7 as set forth in Table 3 comprises a 16s RNA that is at least 80% identical to a nucleotide sequence selected from SEQ ID NOs: 1-720.

[0104] In certain non-limiting embodiments, each strain of a consortia described herein comprises a 16s RNA selected from SEQ ID NOs: 1-720. In certain non-limiting embodiments, each strain of Consortia 1, 2, 3, 4, 5, 6, or 7 as set forth in Table 3 comprises a 16s RNA selected from SEQ ID NOs: 1-720. In certain non-limiting embodiments, each strain of Consortia 1, 2, 3, 4, 5, 6, or 7 as set forth in Table 3 comprises a 16s RNA of the corresponding bacterial strain listed in Table 1. In certain non-limiting embodiments, each strain of Consortia 1, 2, 3, 4, 5, 6, or 7 as set forth in Table 3 comprises a 16s RNA of the corresponding species listed in Table 1.

[0105] In certain non-limiting embodiments, the present disclosure provides a pharmaceutical composition comprising the microbial consortium disclosed herein. In certain embodiments, the composition comprises up to about 10¹³ viable cells. In certain embodiments, the composition comprises a total amount of microbial consortium of up to 500 mg of total dry weight.

[0106] In certain non-limiting embodiments, the present disclosure provides a food product comprising the microbial consortium disclosed herein. In certain embodiments, the food product comprises up to about 10¹³ viable cells. In certain embodiments, the food product comprises a total amount of microbial consortium of up to 500 mg of total dry weight. In certain embodiments, the food product further comprises a prebiotic.

[0107] In certain non-limiting embodiments, the present disclosure provides a method of treating a cancer in a subject in need thereof, the method comprising administering an effective amount of the microbial consortium disclosed herein, the composition thereof, or the food product thereof.

[0108] In certain embodiments, the microbial consortium comprises or consists of:
[0109] (a) Ruminococcus FBI01839, Parabacteroides distasonis, Blautia caecimuris, Longibaculum muris, Blautia massiliensis, Alistipes putredinis, Akkermansia muciniphila, Faecalimonas umbilicata, Clostridium scindens, Bacteroides cellulosilyticus, Eggerthella lenta, Monoglobus pectinilyticus, Gordonibacter urolithinfaciens, Bacteroides ovatus, Bacteroides thetaiotaomicron, Bacteroides uniformis, Phocaeicola dorei, Thomasclavelia ramosa, Lactonifactor FBI02339, UBA1417 FBI02365, Alistipes onderdonkii, Veillonella atypica, Raoultibacter massiliensis, Flavonifractor plautii, Extibacter hylemonae, Odoribacter FBI02593, Bacteroides stercoris, Enterocloster clostridioformis, Hungatella hathewayii, Scatavimonas FBI02887, Ruminococcus gnavus, Enterocloster bolteae, Blautia FBI02891, Bacteroides finegoldii, Luoshenia tenuis, Bacteroides caccae, Phocaeicola vulgatus, Parabacteroides merdae, Lacticaseibacillus paracasei, Oliverpabstia intestinalis, Faecalibacterium prausnitzii, Bifidobacterium longum, Bifidobacterium bifidum, Lawsonibacter asaccharolyticus, Bifidobacterium dentium, and Veillonella atypica; or
[0110] (b) FBI01839, FBI01840, FBI01848, FBI01859, FBI01876, FBI01883, FBI01900, FBI01907, FBI01925, FBI01930, FBI01952, FBI01956, FBI01957, FBI02069, FBI02074, FBI02083, FBI02111, FBI02144, FBI02305, FBI02339, FBI02365, FBI02408, FBI02412, FBI02417, FBI02538, FBI02555, FBI02593, FBI02695, FBI02882, FBI02884, FBI02887, FBI02888, FBI02890, FBI02891, FBI02893, FBI02894, FBI02895, FBI02896, FBI02897, FBI02898, FBI02899, FBI02900, FBI02902, FBI02903, FBI02904, FBI02905, FBI02906, and FBI02908;
[0111] (c) bacterial strains producing the same metabolites or substantially the same metabolites as the strains listed in (b);
[0112] (d) bacterial strains that are functionally equivalent or metabolically equivalent to the strains listed in (b);
[0113] (e) bacterial strains having identical functions or substantially identical functions to the strains listed in (b);
[0114] (f) bacterial species producing the same metabolites or substantially the same metabolites as the species listed in (a);
[0115] (g) bacterial species that are functionally equivalent or metabolically equivalent to the species listed in (a); or
[0116] (h) bacterial species having identical functions or substantially identical functions to the species listed in (a).

[0117] In certain non-limiting embodiments, the present disclosure provides a method of treating a cancer in a subject in need thereof, the method comprising administering an effective amount of the microbial consortium disclosed herein, the composition thereof, or the food product thereof.

[0118] In certain embodiments, the microbial consortium comprises or consists of:
[0119] (a) the bacterial strains listed for Consortia 1, 2, 3, 4, 5, or 6 as set forth in Table 3; or
[0120] (b) The bacterial species listed for Consortia 1, 2, 3, 4, 5, or 6 as set forth in Table 3.

[0121] In certain non-limiting embodiments, the present disclosure provides a method of reducing tumor size in a subject in need thereof, the method comprising administering an effective amount of the microbial consortium disclosed herein, the composition thereof, or the food product thereof.

[0122] In certain embodiments, the microbial consortium comprises or consists of:
[0123] (a) Ruminococcus FBI01839, Parabacteroides distasonis, Blautia caecimuris, Longibaculum muris, Blautia massiliensis, Alistipes putredinis, Akkermansia muciniphila, Faecalimonas umbilicata, Clostridium scindens, Bacteroides cellulosilyticus, Eggerthella lenta, Monoglobus pectinilyticus, Gordonibacter urolithinfaciens, Bacteroides ovatus, Bacteroides thetaiotaomicron, Bacteroides uniformis, Phocaeicola dorei, Thomasclavelia ramosa, Lactonifactor FBI02339, UBA1417 FBI02365, Alistipes onderdonkii, Veillonella atypica, Raoultibacter massiliensis, Flavonifractor plautii, Extibacter hylemonae, Odoribacter FBI02593, Bacteroides stercoris, Enterocloster clostridioformis, Hungatella hathewayii, Scatavimonas FBI02887, Ruminococcus gnavus, Enterocloster bolteae, Blautia FBI02891, Bacteroides finegoldii, Luoshenia tenuis, Bacteroides caccae, Phocaeicola vulgatus, Parabacteroides merdae, Lacticaseibacillus paracasei, Oliverpabstia intestinalis, Faecalibacterium prausnitzii, Bifidobacterium longum, Bifidobacterium bifidum, Lawsonibacter asaccharolyticus, Bifidobacterium dentium, and Veillonella atypica;
[0124] (b) FBI01839, FBI01840, FBI01848, FBI01859, FBI01876, FBI01883, FBI01900, FBI01907, FBI01925, FBI01930, FBI01952, FBI01956, FBI01957, FBI02069, FBI02074, FBI02083, FBI02111, FBI02144, FBI02305, FBI02339, FBI02365, FBI02408, FBI02412, FBI02417, FBI02538, FBI02555, FBI02593, FBI02695, FBI02882, FBI02884, FBI02887, FBI02888, FBI02890, FBI02891, FBI02893, FBI02894, FBI02895, FBI02896, FBI02897, FBI02898, FBI02899, FBI02900, FBI02902, FBI02903, FBI02904, FBI02905, FBI02906, and FBI02908;
[0125] (c) bacterial strains producing the same metabolites or substantially the same metabolites as the strains listed in (b);
[0126] (d) bacterial strains that are functionally equivalent or metabolically equivalent to the strains listed in (b);
[0127] (e) bacterial strains having identical functions or substantially identical functions to the strains listed in (b);
[0128] (f) bacterial species producing the same metabolites or substantially the same metabolites as the species listed in (a);
[0129] (g) bacterial species that are functionally equivalent or metabolically equivalent to the species listed in (a); or
[0130] (h) bacterial species having identical functions or substantially identical functions to the species listed in (a).

[0131] In certain non-limiting embodiments, the present disclosure provides a method of reducing tumor size in a subject in need thereof, the method comprising administering an effective amount of the microbial consortium disclosed herein, the composition thereof, or the food product thereof.

[0132] In certain embodiments, the microbial consortium comprises or consists of:
[0133] (a) the bacterial strains listed for Consortia 1, 2, 3, 4, 5, or 6 as set forth in Table 3; or
[0134] (b) The bacterial species listed for Consortia 1, 2, 3, 4, 5, or 6 as set forth in Table 3.

[0135] In certain non-limiting embodiments, the present disclosure provides a method of slowing tumor growth in a subject in need thereof, the method comprising administering an effective amount of the microbial consortium disclosed herein, the composition thereof, or the food product thereof. In certain embodiments, the microbial consortium comprises or consists of:
[0136] (a) Ruminococcus FBI01839, Parabacteroides distasonis, Blautia caecimuris, Longibaculum muris, Blautia massiliensis, Alistipes putredinis, Akkermansia muciniphila, Faecalimonas umbilicata, Clostridium scindens, Bacteroides cellulosilyticus, Eggerthella lenta, Monoglobus pectinilyticus, Gordonibacter urolithinfaciens, Bacteroides ovatus, Bacteroides thetaiotaomicron, Bacteroides uniformis, Phocaeicola dorei, Thomasclavelia ramosa, Lactonifactor FBI02339, UBA1417 FBI02365, Alistipes onderdonkii, Veillonella atypica, Raoultibacter massiliensis, Flavonifractor plautii, Extibacter hylemonae, Odoribacter FBI02593, Bacteroides stercoris, Enterocloster clostridioformis, Hungatella hathewayii, Scatavimonas FBI02887, Ruminococcus gnavus, Enterocloster bolteae, Blautia FBI02891, Bacteroides finegoldii, Luoshenia tenuis, Bacteroides caccae, Phocaeicola vulgatus, Parabacteroides merdae, Lacticaseibacillus paracasei, Oliverpabstia intestinalis, Faecalibacterium prausnitzii, Bifidobacterium longum, Bifidobacterium bifidum, Lawsonibacter asaccharolyticus, Bifidobacterium dentium, and Veillonella atypica;
[0137] (b) FBI01839, FBI01840, FBI01848, FBI01859, FBI01876, FBI01883, FBI01900, FBI01907, FBI01925, FBI01930, FBI01952, FBI01956, FBI01957, FBI02069, FBI02074, FBI02083, FBI02111, FBI02144, FBI02305, FBI02339, FBI02365, FBI02408, FBI02412, FBI02417, FBI02538, FBI02555, FBI02593, FBI02695, FBI02882, FBI02884, FBI02887, FBI02888, FBI02890, FBI02891, FBI02893, FBI02894, FBI02895, FBI02896, FBI02897, FBI02898, FBI02899, FBI02900, FBI02902, FBI02903, FBI02904, FBI02905, FBI02906, and FBI02908;
[0138] (c) bacterial strains producing the same metabolites or substantially the same metabolites as the strains listed in (b);
[0139] (d) bacterial strains that are functionally equivalent or metabolically equivalent to the strains listed in (b);
[0140] (e) bacterial strains having identical functions or substantially identical functions to the strains listed in (b);
[0141] (f) bacterial species producing the same metabolites or substantially the same metabolites as the species listed in (a);
[0142] (g) bacterial species that are functionally equivalent or metabolically equivalent to the species listed in (a); or
[0143] (h) bacterial species having identical functions or substantially identical functions to the species listed in (a).

[0144] In certain non-limiting embodiments, the present disclosure provides a method of slowing tumor growth in a subject in need thereof, the method comprising administering an effective amount of the microbial consortium disclosed herein, the composition thereof, or the food product thereof. In certain embodiments, the microbial consortium comprises or consists of:
[0145] (a) the bacterial strains listed for Consortia 1, 2, 3, 4, 5, or 6 as set forth in Table 3; or
[0146] (b) The bacterial species listed for Consortia 1, 2, 3, 4, 5, or 6 as set forth in Table 3.

[0147] In certain embodiments, the subject has received an immunotherapy. In certain embodiments, the subject has a tumor or cancer relapse. In certain embodiments, the subject is a non-responder to immunotherapy.

[0148] In certain embodiments, the immunotherapy comprises immune checkpoint inhibitors (ICI), tumor infiltrating lymphocyte (TIL) therapy, or CAR-T therapy. In certain embodiments, the immunotherapy comprises an immune checkpoint inhibitor (ICI). In certain embodiments, the ICI comprises an anti-PD1 antibody, an anti-PD-L1 antibody, an anti-CTLA-4 antibody, an anti-BTLA antibody, an anti-TIM3 antibody, an anti-LAG-3 antibody, or a combination thereof. In certain embodiments, the ICI comprises an anti-PD1 antibody and an anti-CTLA-4 antibody. In certain embodiments, the anti-PD1 antibody comprises pembrolizumab, nivolumab, cemiplimab, dostarlimab, retifanlimab-dlwr, tislelizumab, or combinations thereof. In certain embodiments, the anti-CTLA4 antibody comprises ipilimumab or tremelimumab, or a combination thereof. In certain embodiments, the anti-PD-L1 antibody comprises atezolizumab, avelumab, durvalumab, or a combination thereof.

[0149] In certain embodiments, the method comprises administering a loading dose comprising the microbial consortium, pharmaceutical composition thereof, or food product thereof, and one or more maintenance doses comprising the microbial consortium, pharmaceutical composition thereof, or food product thereof. In certain embodiments, the method further comprises administering at least one antibacterial agent, antiviral agent, antifungal agent, anti-inflammatory agent, immunosuppressive agent, prebiotic, or a combination thereof. In certain embodiments, the microbial consortium, pharmaceutical composition thereof, or food product thereof is administered orally or rectally. In certain embodiments, the microbial consortium or pharmaceutical composition thereof is administered via colonoscope.

[0150] In certain embodiments, the tumor or cancer is selected from prostate cancer, liver cancer, renal cancer, lung cancer, breast cancer, colorectal cancer, pancreatic cancer, brain cancer, hepatocellular carcinoma, lymphoma, leukemia, gastric cancer, cervical cancer, ovarian cancer, thyroid cancer, melanoma, head and neck cancer, skin cancer, and soft tissue sarcoma. In certain embodiments, the tumor or cancer is metastatic or malignant. In certain embodiments, the tumor or cancer is selected from melanoma, mismatch repair-deficient/microsatellite instability-high (dMMR/MSI-H) colorectal cancer, non-small cell lung cancer, renal cell carcinoma, head and neck squamous cell carcinoma, urothelial carcinoma, cervical cancer, and triple-negative breast cancer.

[0151] In certain non-limiting embodiments, the present disclosure provides a kit comprising the microbial consortium disclosed herein, the composition thereof, or the food product thereof. In certain embodiments, the kit comprises a container comprising a desiccant. In certain embodiments, the container comprises anaerobic conditions. In certain embodiments, the container is a blister. In certain embodiments, the kit further comprises written instructions for administering the composition or microbial consortium.

[0152] In certain non-limiting embodiments, the present disclosure provides a method of manufacturing a microbial consortium comprising: (a) obtaining a first bacterial co-culture (DS1), a second bacterial co-culture (DS2), and a third bacterial co-culture (DS3); and (b) co-culturing DS1, DS2, and DS3 in conditions sufficient for the growth of bacterial strain and/or bacterial species. In certain embodiments, the microbial consortium comprises or consists of: (i) Ruminococcus FBI01839, Parabacteroides distasonis, Blautia caecimuris, Longibaculum muris, Blautia massiliensis, Alistipes putredinis, Akkermansia muciniphila, Faecalimonas umbilicata, Clostridium scindens, Bacteroides cellulosilyticus, Eggerthella lenta, Monoglobus pectinilyticus, Gordonibacter urolithinfaciens, Bacteroides ovatus, Bacteroides thetaiotaomicron, Bacteroides uniformis, Phocaeicola dorei, Thomasclavelia ramosa, Lactonifactor FBI02339, UBA1417 FBI02365, Alistipes onderdonkii, Veillonella atypica, Raoultibacter massiliensis, Flavonifractor plautii, Extibacter hylemonae, Odoribacter FBI02593, Bacteroides stercoris, Enterocloster clostridioformis, Hungatella hathewayii, Scatavimonas FBI02887, Ruminococcus gnavus, Enterocloster bolteae, Blautia FBI02891, Bacteroides finegoldii, Luoshenia tenuis, Bacteroides caccae, Phocaeicola vulgatus, Parabacteroides merdae, Lacticaseibacillus paracasei, Oliverpabstia intestinalis, Faecalibacterium prausnitzii, Bifidobacterium longum, Bifidobacterium bifidum, Lawsonibacter asaccharolyticus, Bifidobacterium dentium, and Veillonella atypica; or (ii) FBI01839, FBI01840, FBI01848, FBI01859, FBI01876, FBI01883, FBI01900, FBI01907, FBI01925, FBI01930, FBI01952, FBI01956, FBI01957, FBI02069, FBI02074, FBI02083, FBI02111, FBI02144, FBI02305, FBI02339, FBI02365, FBI02408, FBI02412, FBI02417, FBI02538, FBI02555, FBI02593, FBI02695, FBI02882, FBI02884, FBI02887, FBI02888, FBI02890, FBI02891, FBI02893, FBI02894, FBI02895, FBI02896, FBI02897, FBI02898, FBI02899, FBI02900, FBI02902, FBI02903, FBI02904, FBI02905, FBI02906, and FBI02908.

[0153] In certain embodiments, DS1 comprises fast growing strains, DS2 comprises medium growing strains, and DS3 comprises slow growing strains. In certain embodiments, each of DS1, DS2, and DS3 comprises bacterial strain and/or species listed in FIG. 27. In certain embodiments, the DS3 comprises a modified YCFAC medium comprising soytone in place of casitone. In certain embodiments, the modified YCFAC medium comprises threonine and N-acetylgalactosamine.

[0154] In certain non-limiting embodiments, the present disclosure provides a method of manufacturing a microbial consortium comprising a co-culture method described herein, wherein the microbial consortium comprises or consists of: (a) Ruminococcus FBI01839, Parabacteroides distasonis, Blautia caecimuris, Longibaculum muris, Blautia massiliensis, Alistipes putredinis, Akkermansia muciniphila, Faecalimonas umbilicata, Clostridium scindens, Bacteroides cellulosilyticus, Eggerthella lenta, Monoglobus pectinilyticus, Gordonibacter urolithinfaciens, Bacteroides ovatus, Bacteroides thetaiotaomicron, Bacteroides uniformis, Phocaeicola dorei, Thomasclavelia ramosa, Lactonifactor FBI02339, UBA1417 FBI02365, Alistipes onderdonkii, Veillonella atypica, Raoultibacter massiliensis, Flavonifractor plautii, Extibacter hylemonae, Odoribacter FBI02593, Bacteroides stercoris, Enterocloster clostridioformis, Hungatella hathewayii, Scatavimonas FBI02887, Ruminococcus gnavus, Enterocloster bolteae, Blautia FBI02891, Bacteroides finegoldii, Luoshenia tenuis, Bacteroides caccae, Phocaeicola vulgatus, Parabacteroides merdae, Lacticaseibacillus paracasei, Oliverpabstia intestinalis, Faecalibacterium prausnitzii, Bifidobacterium longum, Bifidobacterium bifidum, Lawsonibacter asaccharolyticus, Bifidobacterium dentium, and Veillonella atypica; or (b) FBI01839, FBI01840, FBI01848, FBI01859, FBI01876, FBI01883, FBI01900, FBI01907, FBI01925, FBI01930, FBI01952, FBI01956, FBI01957, FBI02069, FBI02074, FBI02083, FBI02111, FBI2144, FBI02305, FBI02339, FBI02365, FBI02408, FBI02412, FBI02417, FBI2538, FBI2555, FBI02593, FBI02695, FBI02882, FBI02884, FBI02887, FBI02888, FBI02890, FBI02891, FBI02893, FBI02894, FBI02895, FBI02896, FBI02897, FBI02898, FBI02899, FBI02900, FBI02902, FBI02903, FBI02904, FBI02905, FBI02906, and FBI02908.

[0155] In certain embodiments, the method further comprises coculturing in three (3) coculture drug substance (DS) buckets. In certain embodiments, the DS buckets are the buckets listed in FIG. 27. In certain embodiments, the method of manufacturing each DS bucket is the method described in each of FIGS. 29, 30, and 31.

[0156] In certain non-limiting embodiments, the present disclosure provides a method of growing Akkermansia muciniphila in a co-culture described herein.

### BRIEF DESCRIPTION OF THE DRAWINGS

[0157] FIG. 1 is a diagram showing the manufacturing process overview from microbes in master cell banks, to fermentation, drug substance blending and drug product formulation in capsule form or a bag of liquid concentrate.

[0158] FIG. 2 shows growth curve diagrams over time and with 7 serial dilutions (E-1 through E-7) for super donor strains FBI01839 (FIG. 2A), FBI01840 (FIG. 2B), FBI01848 (FIG. 2C), FBI01859 (FIG. 2D), FBI01861 (FIG. 2E) and FBI01863 (FIG. 2F).

[0159] FIG. 3 shows growth curve diagrams over time and with 7 serial dilutions (E-1 through E-7) for super donor strains FBI01866 (FIG. 3A), FBI01876 (FIG. 3B), FBI01883 (FIG. 3C), FBI01900 (FIG. 3D), FBI01907 (FIG. 3E) and FBI01925 (FIG. 3F).

[0160] FIG. 4 shows growth curve diagrams over time and with 7 serial dilutions (E-1 through E-7) for super donor strains FBI01930 (FIG. 4A), FBI01952 (FIG. 4B), FBI01956 (FIG. 4C), FBI01957 (FIG. 4D), FBI02069 (FIG. 4E) and FBI02074 (FIG. 4F).

[0161] FIG. 5 shows growth curve diagrams over time and with 7 serial dilutions (E-1 through E-7) for super donor strains FBI02083 (FIG. 5A), FBI02101 (FIG. 5B), FBI02106 (FIG. 5C), FBI2111 (FIG. 5D), FBI02144 (FIG. 5E) and FBI2158 (FIG. 5F).

[0162] FIG. 6 shows growth curve diagrams over time and with 7 serial dilutions (E-1 through E-7) for super donor strains FBI02176 (FIG. 6A), FBI02208 (FIG. 6B), FBI2271 (FIG. 6C), FBI02288 (FIG. 6D), FBI02305 (FIG. 6E) and FBI02325 (FIG. 6F).

[0163] FIG. 7 shows growth curve diagrams over time and with 7 serial dilutions (E-1 through E-7) for super donor strains FBI02339 (FIG. 7A), FBI02365 (FIG. 7B), FBI02408 (FIG. 7C), FBI02412 (FIG. 7D), FBI02417 (FIG. 7E) and FBI02538 (FIG. 7F).

[0164] FIG. 8 shows growth curve diagrams over time and with 7 serial dilutions (E-1 through E-7) for super donor strains FBI02555 (FIG. 8A), FBI02593 (FIG. 8B), FBI02695 (FIG. 8C), FBI02882 (FIG. 8D), FBI02884 (FIG. 8E) and FBI02887 (FIG. 8F).

[0165] FIG. 9 shows growth curve diagrams over time and with 7 serial dilutions (E-1 through E-7) for super donor strains FBI02888 (FIG. 9A), FBI02890 (FIG. 9B), FBI02891 (FIG. 9C), FBI02893 (FIG. 9D), FBI02894 (FIG. 9E) and FBI02895 (FIG. 9F).

[0166] FIG. 10 shows growth curve diagrams over time and with 7 serial dilutions (E-1 through E-7) for super donor strains FBI02896 (FIG. 10A), FBI02897 (FIG. 10B), FBI02898 (FIG. 10C), FBI02899 (FIG. 10D), FBI02900 (FIG. 10E) and FBI2901 (FIG. 10F).

[0167] FIG. 11 shows growth curve diagrams over time and with 7 serial dilutions (E-1 through E-7) for super donor strains FBI02902 (FIG. 11A), FBI02903 (FIG. 11B), FBI02904 (FIG. 11C), FBI02905 (FIG. 11D), FBI02906 (FIG. 11E) and FBI02908 (FIG. 11F).

[0168] FIG. 12 is a graph showing the effect of mouse pretreatment with fecal suspension from a super donor (circles) as compared to a benchmark ICI non-responder (gray triangles) or a benchmark ICI responder (black inverted triangles) on tumor volume in an ICI treated mouse melanoma model.

[0169] FIG. 13 is a graph comparing the effect of mouse pretreatment with fecal suspension from the super donor (circles), Microbial Consortium 1 (gray squares), Microbial Consortium 2 (black squares) and an ICI non-responder (triangles) on tumor volume in an ICI treated mouse melanoma model.

[0170] FIG. 14 is a graph comparing the effect of mouse pretreatment with fecal suspension from a benchmark ICI non responder (circles) with Microbial Consortium 2 (squares) and Microbial Consortium 5 (triangles) in an ICI treated mouse melanoma model.

[0171] FIG. 15 is a graph comparing the effect of mouse pretreatment with fecal suspension from the super donor (circles), Microbial Consortium 2 (squares), and an ICI treatment non-responder (triangles) in an ICI treated mouse model of colorectal cancer.

[0172] FIG. 16 is a graph comparing the effect of mouse pretreatment with fecal suspension from the super donor (circles), Microbial Consortium 2 (squares), and a benchmark ICI treatment responder (triangles) on tumor area in an ICI treated mouse fibrosarcoma cancer model.

[0173] FIG. 17 is a graph comparing the effects of mouse pretreatment with fecal suspension from a benchmark ICI non-responder (squares), Microbial Consortium 2 (open circles), Microbial Consortium 3 (solid triangles, Microbial Consortium 4 (solid circles) and Microbial Consortium 6 (open triangles) in the ICI treated mouse fibrosarcoma cancer model.

[0174] FIG. 18 is a plot showing tumor volume in mice at day 6 after mouse tumor injection in Microbial Consortium 2 and responder treatment groups.

[0175] FIG. 19 is a plot showing tumor volume in a breast adenocarcinoma mouse cancer model, wherein the mice had a pre-existing microbiome, 10 days after mouse tumor injection in groups who received super donor fecal microbiota transplant (FMT), Microbial Consortium 2 suspension, ICI responder FMT, ICI non-responder FMT, and no treatment.

[0176] FIG. 20 is a bar graph showing the relative abundance of bacteria identified from the super donor FMT present in clinical study recipients after FMT. The detection of the bacteria pre-FMT (left bars in each pairing on each side of a hash mark) was near zero. Post-FMT measures shows an increase in the abundance of the bacteria (right bars in each pairing) and, therefore, substantial engraftment of isolates from this super donor in the clinical trial recipients.

[0177] FIG. 21 is a plot of engraftment data for the mouse models and the human clinical patients following super donor FMT or, in mice, microbial consortium treatment. The upper plot shows engraftment in various mouse models (germ free BP melanoma and specific pathogen free (SPF) MC38 colorectal cancer models). Community Treated is treated with Microbial Consortium 2, except for the top Study 333 data in Germ-Free BP melanoma mice, in which the mice were treated with Microbial Consortium 1. SD Stool Treated is super donor FMT treatment. Each vertical column represents a bacterial isolate. The lower plot shows the results of human studies and each row represents a patient. The identities of the isolates in each column align with those of the mouse models and super donor. Correlate data on % Prevalence and % Mean Abundance in the super donor stool sample itself is provided at the top of the plot.

[0178] FIG. 22 is a schematic image showing phylogenetic trees. The left hand image shows the phylogenetic tree for the Super Donor Microbiome. The key phyla are shaded. The largest group in the lower right is Bacillota. Then, moving in a counter-clockwise direction, the other phyla Bacteroidota, Actinomycetota, and Verrucomicrobiota. the right hand image shows the phylogenetic tree for the Super Donor Isolates.

[0179] FIG. 23 is a schematic of the dosing schedule for mice as described in Example 9.

[0180] FIG. 24 shows a comparison of the ability of Consortia 7 to reduce tumor area compared to the control of a non-responder FMT over time, showing a significant trend of reduced tumor size post dosing.

[0181] FIG. 25 shows the tumor size comparison of treatment with Consortia 7 compared to a non-responder FMT at day 6.

[0182] FIG. 26 shows that there was no negative effect on the weight of the mice upon administration of Consortia 7.

[0183] FIG. 27 shows the final DSs that were designed for optimal growth for Consortia 7.

[0184] FIGS. 28A-28C show growth curves and bucketing of each of the strains of Consortia 7 into DS1-3.

[0185] FIG. 29 depicts the DS1 co-culture fermentation process for the 20 strains included in DS1 of Consortia 7.

[0186] FIG. 30 depicts the DS2 co-culture fermentation process for the 19 strains included in DS2 of Consortia 7.

[0187] FIG. 31 depicts the DS3 co-culture fermentation process for the 20 strains included in DS3 of Consortia 7.

[0188] FIG. 32 depicts the initial experiment to grow DS3.

[0189] FIG. 33 depicts the optimized method of growing DS3 for Consortia 7.

### DETAILED DESCRIPTION

[0190] The present disclosure provides microbial consortia useful as therapeutics for treating cancer and/or reducing tumor volume or tumor growth in patients. The microbial species present in each of the consortia were chosen based on identification of microbial species present in fecal material donations from a super donor cancer survivor. Given that the species identified were from a single donor, each microbial consortium containing some or all of these species has species that can be compatible and cooperate to form a functional ecosystem. All references cited are herein incorporated by reference.

### Definitions

[0191] Unless defined otherwise, all technical and scientific terms used herein have the meaning commonly understood by a person skilled in the art. The following references provide one of skill with a general definition of many of the terms used in the presently disclosed subject matter: Singleton et al., Dictionary of Microbiology and Molecular Biology (2nd ed. 1994); The Cambridge Dictionary of Science and Technology (Walker ed., 1988); The Glossary of Genetics, 5th Ed., R. Rieger et al. (eds.), Springer Verlag (1991); and Hale & Marham, The Harper Collins Dictionary of Biology (1991). As used herein, the following terms have the meanings ascribed to them below, unless specified otherwise.

[0192] It is understood that aspects and embodiments of the present disclosure described herein include “comprising,” “consisting,” and “consisting essentially of” aspects and embodiments. The terms “comprises” and “comprising” are intended to have the broad meaning ascribed to them in U.S. Patent Law and can mean “includes,” “including” and the like. To facilitate an understanding of the present disclosure, a number of terms and phrases are defined below.

[0193] The term “a” and “an” as used herein mean “one or more” and include the plural unless the context is appropriate.

[0194] By “fecal microbiome” of a subject is meant the community of microorganisms that exists in a fecal specimen from the subject.

[0195] By “microbial consortium,” is meant a mixture of two or more isolated species of microbes that have been cultured.

[0196] By “fecal microbiota transplant” or “FMT” is meant the transplant of a mixture of two or more bacterial species derived from the fecal material of a donor and transplanted to a recipient.

[0197] By “super donor,” is meant a subject that responds to a treatment and has a favorable property in their fecal material that converts another subject who has been a non-responder to the treatment into a responder after FMT from the super donor.

[0198] By “responder,” is meant a subject that responds to a treatment but who does not demonstrate a favorable property in their fecal material that converts another subject from a non-responder into a responder after FMT from the responder.

[0199] As used herein, the terms “gastrointestinal engraftment” or “engraft” or “engraftment” refer to the establishment of one or more than one microbe, or microbial consortia, in one or more niches of the gastrointestinal tract that, prior to administration of the microbial consortium, were not present or detectable. Engraftment may be transient or may be persistent.

[0200] As used herein, the term “supportive community” refers to one or more microbial species that, when administered with an active microbe, enhance one or more characteristics of the active microbe selected from the group consisting of gastrointestinal engraftment, biomass, metabolic substrate metabolism, and longitudinal stability.

[0201] As used herein, the term “pharmaceutical composition” refers to the combination of an active agent with a carrier, inert or active, making the composition especially suitable for therapeutic use in vivo or ex vivo.

[0202] As used herein, the term “pharmaceutically acceptable carrier” refers to any of the standard pharmaceutical carriers, such as phosphate-buffered saline solution, water, emulsions (e.g., oil/water or water/oil emulsions), and various types of wetting agents. The compositions also can include stabilizers and preservatives. For examples of carriers, stabilizers, and adjuvants, see e.g., Martin, Remington's Pharmaceutical Sciences, 15th Ed. Mack Publ. Co., Easton, Pa. [1975].

[0203] As used herein, the term “metabolism,” “metabolize,” “metabolization,” or variants thereof refers to the biochemical conversion of a metabolic substrate to a metabolic product. In certain embodiments, metabolization includes isomerization.

[0204] As used herein, the term “biomass,” refers to the total mass of one or more microbes, or consortia, in a given area or volume.

[0205] As used herein, the term “microbial consortium” refers to a mixture of two or more isolated microbial strains that are expanded in culture, wherein one microbial strain in the mixture has a beneficial or desired effect on another microbial strain in the mixture.

[0206] As used herein, the term “subject” refers to an organism to be treated by the microbial consortium and compositions described herein. Such organisms preferably include, but are not limited to, mammals (e.g., murines, simians, equines, bovines, porcines, canines, felines, and the like), and more preferably include humans.

[0207] As used herein, the terms “tumor,” “cancer,” and “neoplasia” are used interchangeably and refer to cells exhibiting uncontrolled growth, proliferation, or survival. The term “malignancy” refers to the ability of such cells to invade adjacent or surrounding tissue. The term “metastasis” refers to the spread or dissemination of a tumor, cancer, or neoplasia to one or more secondary sites, locations, or regions within the subject, wherein the secondary sites are distinct from the primary tumor or cancer.

[0208] The term percent “identity” or “sequence identity,” in the context of two or more nucleic acid or polypeptide sequences, refer to two or more sequences or subsequences that have a specified percentage of nucleotides or amino acid residues that are the same, when compared and aligned for maximum correspondence, as measured using one of the sequence comparison algorithms described below (e.g., BLASTP and BLASTN or other algorithms available to persons of skill) or by visual inspection. Depending on the application, the percent “identity” can exist over a region of the sequence being compared, e.g., over a functional domain, or, alternatively, exist over the full length of the two sequences to be compared.

[0209] For sequence comparison, typically one sequence acts as a reference sequence to which test sequences are compared. When using a sequence comparison algorithm, test and reference sequences are input into a computer, subsequence coordinates are designated, if necessary, and sequence algorithm program parameters are designated. The sequence comparison algorithm then calculates the percent sequence identity for the test sequence(s) relative to the reference sequence, based on the designated program parameters.

[0210] Optimal alignment of sequences for comparison can be conducted, e.g., by the local homology algorithm of Smith & Waterman, Adv. Appl. Math. 2:482 (1981), by the homology alignment algorithm of Needleman & Wunsch, J. Mol. Biol. 48:443 (1970), by the search for similarity method of Pearson & Lipman, Proc. Nat'l. Acad. Sci. USA 85:2444 (1988), by computerized implementations of these algorithms (GAP, BESTFIT, FASTA, and TFASTA in the Wisconsin Genetics Software Package, Genetics Computer Group, 575 Science Dr., Madison, Wis.), or by visual inspection (see generally Ausubel et al., infra).

[0211] One example of an algorithm that is suitable for determining percent sequence identity and sequence similarity is the BLAST algorithm, which is described in Altschul et al., J. Mol. Biol. 215:403-410 (1990). Software for performing BLAST analyses is publicly available through the National Center for Biotechnology Information (www.ncbi.nlm.nih.gov/).

[0212] When used in reference to 16S rRNA sequences, a “sequence identity” of at least 97% indicates that two microbial strains are likely to belong to the same species, whereas 16S rRNA sequences having less than 97% sequence identity indicate that two microbial strains likely belong to different species, and 16S rRNA sequences having less than 95% sequence identity indicates that two microbial strains likely belong to distinct genera (Stackebrandt E., and Goebel, B. M., Int J Syst Bact, 44 (1994) 846-849).

[0213] As used herein, the terms “functional equivalent” or “functionally equivalent” refers to microbes, microbial consortia, and compositions that share similar or identical role (e.g., metabolism of oxalate). For example, without any limitation, two different microbial consortium that can catalyze high concentration of oxalate are functional equivalent to each other.

[0214] As used herein, the term “probiotic” refers to live microorganisms which, when administered in adequate amounts, confer a health benefit on the host. Further information on probiotics can be found in Hill et al., Nature reviews Gastroenterology & hepatology 11.8 (2014): 506-514.

[0215] Throughout the description, where compositions are described as having, including, or comprising specific components, or where processes and methods are described as having, including, or comprising specific steps, it is contemplated that, additionally, there are compositions of the present disclosure that consist essentially of, or consist of, the recited components, and that there are processes and methods according to the present disclosure that consist essentially of, or consist of, the recited processing steps.

[0216] As a general matter, compositions specifying a percentage are by weight unless otherwise specified. Further, if a variable is not accompanied by a definition, then the previous definition of the variable controls.

### Microbial Consortium

[0217] The present disclosure described herein provides microbial consortia. A microbial consortium comprises a plurality of active microbes and can also have an effective amount of a supportive community of microbes.

[0218] In certain embodiments, each microbial consortium disclosed herein comprises all, or a subset, of the bacterial species listed in Table 1. The listing includes genus and species designations. For species that are novel, the bacteria are identified by genus in combination with an FBI identifier. In one exemplary embodiment, a novel genus was identified; this genus is referenced by its closest known relative, UBA1417, together with its corresponding FBI identifier. Sequencing of these organisms generated multiple genomic DNA sequences, which are represented by the respective SEQ ID NO identifiers provided herein.

[0219] In certain embodiments, each microbial consortium disclosed herein comprises all, or a subset, of the bacterial strains listed in Table 1. The listing includes genus and species designations. For species that are novel, the bacteria are identified by genus in combination with an FBI identifier.

[0220] In certain embodiments, each microbial consortium disclosed herein comprises all, or a subset, of the following bacterial strains listed in Table 1: FBI01839, FBI01840, FBI01848, FBI01859, FBI01876, FBI01883, FBI01900, FBI01907, FBI01925, FBI01930, FBI01952, FBI01956, FBI01957, FBI02069, FBI02074, FBI02083, FBI02111, FBI02144, FBI02305, FBI02339, FBI02365, FBI02408, FBI02412, FBI02417, FBI02538, FBI02555, FBI02593, FBI02695, FBI02882, FBI02884, FBI02887, FBI02888, FBI02890, FBI02891, FBI02893, FBI02894, FBI02895, FBI02896, FBI02897, FBI02898, FBI02899, FBI02900, FBI02902, FBI02903, FBI02904, FBI02905, FBI02906, and FBI02908.

[0221] In certain embodiments, each microbial consortium disclosed herein comprises all, or a subset, of the following bacterial species listed in Table 1: Ruminococcus FBI01839, Parabacteroides distasonis, Blautia caecimuris, Longibaculum muris, Blautia massiliensis, Alistipes putredinis, Akkermansia muciniphila, Faecalimonas umbilicata, Clostridium scindens, Bacteroides cellulosilyticus, Eggerthella lenta, Monoglobus pectinilyticus, Gordonibacter urolithinfaciens, Bacteroides ovatus, Bacteroides uniformis, Phocaeicola dorei, Thomasclavelia ramosa, Lactonifactor FBI02339, UBA1417 FBI02365, Alistipes onderdonkii, Veillonella atypica, Raoultibacter massiliensis, Flavonifractor plautii, Extibacter hylemonae, Odoribacter FBI02593, Bacteroides stercoris, Enterocloster clostridioformis, Hungatella hathewayii, Scatavimonas FBI02887, Ruminococcus gnavus, Enterocloster bolteae, Blautia FBI02891, Bacteroides finegoldii, Luoshenia tenuis, Bacteroides caccae, Phocaeicola vulgatus, Parabacteroides merdae, Lacticaseibacillus paracasei, Oliverpabstia intestinalis, Faecalibacterium prausnitzii, Bifidobacterium longum, Bifidobacterium bifidum, Lawsonibacter asaccharolyticus, Bifidobacterium dentium, and Veillonella atypica.

[0222] In certain embodiments, each microbial consortium disclosed herein does not include strain FBI02325 (Bacteroides thetaiotaomicron). In certain embodiments, each microbial consortium disclosed herein does not include Bacteroides thetaiotaomicron.

[0223] In certain embodiments, each microbial consortium disclosed herein does not include FBI01861 and/or FBI01866 (Blautia wexlerae). In certain embodiments, each microbial consortium disclosed herein does not the species Blautia wexlerae.

[0224] In certain embodiments, each microbial consortium disclosed herein does not include FBI01863 (Streptococcus salivarius). In certain embodiments, each microbial consortium disclosed herein does not include the species Streptococcus salivarius.

[0225] In certain embodiments, each microbial consortium disclosed herein does not include one or more of FBI02158 (Streptococcus parasanguinis), FBI02176 (Streptococcus FBI02176), FBI02208 (Streptococcus parasanguinis), FBI02271 (Enterococcus gallinarum), and/or FBI02288 (Streptococcus gallolyticus). In certain embodiments, each microbial consortium disclosed herein does not include one or more of the species Streptococcus parasanguinis, Streptococcus FBI02176, Streptococcus parasanguinis, Enterococcus gallinarum, and/or Streptococcus gallolyticus.

[0226] In certain embodiments, each microbial consortium disclosed herein does not include FBI02901 (Agathobacter rectalis). In certain embodiments, each microbial consortium disclosed herein does not include the species Agathobacter rectalis.

[0227] In certain embodiments, each microbial consortium disclosed herein includes FBI02897 (Phocaeicola vulgatus). In certain embodiments, each microbial consortium disclosed herein includes the species Phocaeicola vulgatus.

TABLE 1
Bacterial components of microbial consortia

| Bacteria | | |
|---|---|---|
| ID | Species | SEQ ID NOS |
| FBI01839 | Ruminococcus FBI01839 | 1 |
| FBI01840 | Parabacteroides | 2-9 |
| | distasonis | |
| FBI01848 | Blautia caecimuris | 10 |
| FBI01859 | Longibaculum muris | 11 |
| FBI01861 | Blautia wexlerae | 12 |
| FBI01863 | Streptococcus salivarius | 13 |
| FBI01866 | Blautia wexlerae | 14 |
| FBI01876 | Blautia massiliensis | 15 |
| FBI01883 | Alistipes putredinis | 16 |
| FBI01900 | Akkermansia | 17-35 |
| | muciniphila | |
| FBI01907 | Faecalimonas umbilicata | 36-38 |
| FBI01925 | Clostridium scindens | 39 |
| FBI01930 | Bacteroides | 40-43 |
| | cellulosilyticus | |
| FBI01952 | Eggerthella lenta | 44-74 |
| FBI01956 | Monoglobus | 75 |
| | pectinilyticus | |
| FBI01957 | Gordonibacter | 76-83 |
| | urolithinfaciens | |
| FBI02069 | Bacteroides ovatus | 84-88 |
| FBI02074 | Bacteroides | 89-92 |
| | thetaiotaomicron | |
| FBI02083 | Bacteroides uniformis | 93-150 |
| FBI02101 | Enterococcus avium | 151-152 |
| FBI02106 | Streptococcus mutans | 153 |
| FBI02111 | Bacteroides uniformis | 154-158 |
| FBI02144 | Phocaeicola dorei | 159-206 |
| FBI02158 | Streptococcus | 207-208 |
| | parasanguinis | |
| FBI02176 | Streptococcus FBI02176 | 209-211 |
| FBI02208 | Streptococcus | 212-213 |
| | parasanguinis | |
| FBI02271 | Enterococcus gallinarum | 214 |
| FBI02288 | Streptococcus | 215-218 |
| | gallolyticus | |
| FBI02305 | Thomasclavelia ramosa | 219-247 |
| FBI02325 | Bacteroides | 248-272 |
| | thetaiotaomicron | |
| FBI02339 | Lactonifactor FBI02339 | 273-277 |
| FBI02365 | UBA1417 FBI02365 | 278-310 |
| FBI02408 | Alistipes onderdonkii | 311-333 |
| FBI02412 | Veillonella atypica | 334-335 |
| FBI02417 | Raoultibacter | 336 |
| | massiliensis | |
| FBI02538 | Flavonifractor plautii | 337-425 |
| FBI02555 | Extibacter hylemonae | 426-456 |
| FBI02593 | Odoribacter FBI02593 | 457 |
| FBI02695 | Bacteroides stercoris | 458-487 |
| FBI02882 | Enterocloster | 488-540 |
| | clostridioformis | |
| FBI02884 | Hungatella hathewayii | 541-542 |
| FBI02887 | Scatavimonas FBI02887 | 543-549 |
| FBI02888 | Ruminococcus gnavus | 550-574 |
| FBI02890 | Enterocloster bolteae | 575-581 |
| FBI02891 | Blautia FBI02891 | 582-583 |
| FBI02893 | Bacteroides ovatus | 584-595 |
| FBI02894 | Bacteroides finegoldii | 596-606 |
| FBI02895 | Luoshenia tenuis | 607 |
| FBI02896 | Bacteroides caccae | 608-617 |
| FBI02897 | Phocaeicola vulgatus | 618-635 |
| FBI02898 | Parabacteroides merdae | 636-641 |
| FBI02899 | Lacticaseibacillus | 642-643 |
| | paracasei | |
| FBI02900 | Oliverpabstia intestinalis | 644-654 |
| FBI02902 | Faecalibacterium | 667-702 |
| | prausnitzii | |
| FBI02903 | Bifidobacterium longum | 703-705 |
| FBI02904 | Bifidobacterium bifidum | 706 |
| FBI02905 | Lawsonibacter | 707-710 |
| | asaccharolyticus | |
| FBI02906 | Bifidobacterium dentium | 711 |
| FBI02908 | Veillonella atypica | 712-720 |
| FBI02901 | Agathobacter rectalis | 655-666 |

[0228] In certain embodiments, subsets of species can include those able to produce short chain fatty acids and/or modify bile acids, utilize specific types of nutrients, occupy certain niches, cross-feed, degrade mucin, protect against disease, and/or provide therapeutic benefit.

[0229] In certain embodiments, the microbial consortium comprises at least 50%, 55%, 60%, 65%, 70%, 75%, 80%, 85% 90%, or 95% of the bacterial species selected from Ruminococcus FBI01839, Parabacteroides distasonis, Blautia caecimuris, Longibaculum muris, Blautia wexlerae FBI01861, Blautia wexlerae FBI01866, Blautia massiliensis, Alistipes putredinis, Akkermansia muciniphila, Faecalimonas umbilicate, Clostridium scindens, Bacteroides cellulosilyticus, Eggerthella lenta, Monoglobus pectinilyticus, Gordonibacter urolithinfaciens, Bacteroides ovatus, Bacteroides thetaiotaomicron, Bacteroides uniformis FBI02083, Bacteroides uniformis FBI02111, Phocaeicola dorei, Thomasclavelia ramose, Bacteroides thetaiotaomicron, Lactonifactor FBI02339, UBA1417 FBI02365, Alistipes onderdonkii, Veillonella atypica FBI02412, Raoultibacter massiliensis, Flavonifractor plautii, Extibacter hylemonae, Odoribacter FBI02593, and Bacteroides stercoris.

[0230] In certain embodiments, the microbial consortium comprises at least 50%, 55%, 60%, 65%, 70%, 75%, 80%, 85% 90%, or 95% of the bacterial species selected from Ruminococcus FBI01839, Parabacteroides distasonis, Blautia caecimuris, Longibaculum muris, Blautia wexlerae FBI01861, Blautia wexlerae FBI01866, Blautia massiliensis, Alistipes putredinis, Akkermansia muciniphila, Faecalimonas umbilicate, Clostridium scindens, Bacteroides cellulosilyticus, Eggerthella lenta, Monoglobus pectinilyticus, Gordonibacter urolithinfaciens, Bacteroides ovatus, Bacteroides thetaiotaomicron, Bacteroides uniformis FBI02083, Bacteroides uniformis FBI02111, Phocaeicola dorei, Thomasclavelia ramose, Bacteroides thetaiotaomicron, Lactonifactor FBI02339, UBA1417 FBI02365, Alistipes onderdonkii, Veillonella atypica FBI02412, Raoultibacter massiliensis, Flavonifractor plautii, Extibacter hylemonae, Odoribacter FBI02593, Bacteroides stercoris, Enterocloster clostridioformis, Hungatella hathewayii, Scatavimonas FBI02887, Ruminococcus gnavus, Enterocloster bolteae, Blautia FBI02891, Bacteroides finegoldii, Luoshenia tenuis, Bacteroides caccae, Phocaeicola vulgatus, Parabacteroides merdae, Lacticaseibacillus paracasei, Oliverpabstia intestinalis, Faecalibacterium prausnitzii, Bifidobacterium longum, Bifidobacterium bifidum, Lawsonibacter asaccharolyticus, Bifidobacterium dentium, and Veillonella atypica FBI-2908.

[0231] In certain embodiments, the microbial consortium comprises at least 50%, 55%, 60%, 65%, 70%, 75%, 80%, 85% 90%, or 95% of the bacterial species selected from Consortia 7 as set forth in Table 3.

[0232] In certain embodiments, the microbial consortium comprises at least 50%, 55%, 60%, 65%, 70%, 75%, 80%, 85% 90%, or 95% of the bacterial species selected from Consortia 6 as set forth in Table 3. In certain embodiments, the microbial consortium comprises at least 50%, 55%, 60%, 65%, 70%, 75%, 80%, 85% 90%, or 95% of the bacterial species selected from Consortia 5 as set forth in Table 3. In certain embodiments, the microbial consortium comprises at least 50%, 55%, 60%, 65%, 70%, 75%, 80%, 85% 90%, or 95% of the bacterial species selected from Consortia 4 as set forth in Table 3. In certain embodiments, the microbial consortium comprises at least 50%, 55%, 60%, 65%, 70%, 75%, 80%, 85% 90%, or 95% of the bacterial species selected from Consortia 3 as set forth in Table 3. In certain embodiments, the microbial consortium comprises at least 50%, 55%, 60%, 65%, 70%, 75%, 80%, 85% 90%, or 95% of the bacterial species selected from Consortia 2 as set forth in Table 3. In certain embodiments, the microbial consortium comprises at least 50%, 55%, 60%, 65%, 70%, 75%, 80%, 85% 90%, or 95% of the bacterial species selected from Consortia 1 as set forth in Table 3.

[0233] In certain embodiments, the microbial consortium does not comprise Streptococcus or Enterococcus bacteria. In certain embodiments, these bacteria can have limited engraftment in humans and in mice. In certain embodiments, these microbes are not true gut commensals (e.g., oral microbes) and/or have pathobiont characteristics.

[0234] In certain embodiments, the microbial consortium also comprises one or more of Streptococcus salivarius, Streptococcus mutans, Streptococcus parasanguinis FBI02158, Streptococcus FBI02176, Streptococcus parasanguinis FBI02208, Streptococcus gallolyticus, Enterococcus avium, and Enterococcus gallinarum.

[0235] In certain embodiments, the microbial consortium comprises Ruminococcus FBI01839, Parabacteroides distasonis, Blautia caecimuris, Longibaculum muris, Blautia wexlerae FBI01861, Blautia massiliensis, Alistipes putredinis, Akkermansia muciniphila, Faecalimonas umbilicate, Clostridium scindens, Bacteroides cellulosilyticus, Eggerthella lenta, Monoglobus pectinilyticus, Gordonibacter urolithinfaciens, Bacteroides ovatus, Bacteroides thetaiotaomicron FBI02074, Bacteroides uniformis FBI02083, Bacteroides uniformis FBI02111, Phocaeicola dorei, Thomasclavelia ramose, Bacteroides thetaiotaomicron FBI02325, Lactonifactor FBI02339, UBA1417 FBI02365, Alistipes onderdonkii, Raoultibacter massiliensis, Flavonifractor plautii, Extibacter hylemonae, Odoribacter FBI02593, Bacteroides stercoris, Enterocloster clostridioformis, Hungatella hathewayii, Scatavimonas FBI02887, Ruminococcus gnavus, Enterocloster bolteae, Bacteroides ovatus, Bacteroides finegoldii, Bacteroides caccae, Phocaeicola vulgatus, Parabacteroides merdae, Oliverpabstia intestinalis, Bifidobacterium longum, Bifidobacterium bifidum, Lawsonibacter asaccharolyticus, and Agathobacter rectalis.

[0236] In certain embodiments, the microbial consortium comprises Ruminococcus FBI01839, Parabacteroides distasonis, Blautia caecimuris, Longibaculum muris, Blautia wexlerae FBI01861, Blautia massiliensis, Alistipes putredinis, Akkermansia muciniphila, Faecalimonas umbilicate, Clostridium scindens, Bacteroides cellulosilyticus, Eggerthella lenta, Monoglobus pectinilyticus, Gordonibacter urolithinfaciens, Bacteroides ovatus, Bacteroides thetaiotaomicron FBI02074, Bacteroides uniformis FBI02083, Enterococcus avium, Bacteroides uniformis FBI02111, Phocaeicola dorei, Enterococcus gallinarum, Streptococcus gallolyticus, Thomasclavelia ramose, Bacteroides thetaiotaomicron FBI02325, Lactonifactor FBI02339, UBA1417 FBI02365, Alistipes onderdonkii, Veillonella atypica FBI02412, Raoultibacter massiliensis, Flavonifractor plautii, Extibacter hylemonae, Odoribacter FBI02593, Bacteroides stercoris, Enterocloster clostridioformis, Hungatella hathewayii, Scatavimonas FBI02887, Ruminococcus gnavus, Enterocloster bolteae, Blautia FBI02891, Bacteroides finegoldii, Luoshenia tenuis, Bacteroides caccae, Phocaeicola vulgatus, Parabacteroides merdae, Bifidobacterium longum, and Lawsonibacter asaccharolyticus.

[0237] In certain embodiments, the microbial consortium comprises Ruminococcus spp., Parabacteroides distasonis, Akkermansia muciniphila, Faecalibacterium prausnitzii, Bacteroides thetaiotaomicron, Bifidobacterium longum, Enterococcus faecium, Bacteroides fragilis, Bifidobacterium bifidum, Alistipes putredinis, Clostridium scindens, Bacteroides uniformis, Bacteroides ovatus, Agathobacter rectalis, Phocaeicola vulgatus, Enterococcus gallinarum, Blautia spp, and/or Odoribacter spp.

[0238] In certain embodiments, the microbial consortium comprises a bacterial species selected from each of the phyla Bacillota, Bacteriodota, Actinomycetota, and Verrucomicrobiota, as described in Table 1 above.

[0239] In certain embodiments, the microbial consortium comprises a microbial consortium designated as “Microbial Consortium 1” (Consortia 1 as set forth in Table 3), “Microbial Consortium 2” (Consortia 2 as set forth in Table 3), “Microbial Consortium 3 (Consortia 3 as set forth in Table 3), “Microbial Consortium 4” (Consortia 4 as set forth in Table 3), “Microbial Consortium 5” (Consortia 5 as set forth in Table 3), “Microbial Consortium 6” (Consortia 6 as set forth in Table 3), or “Microbial Consortium 7” (Consortia 7 as set forth in Table 3).

[0240] In certain embodiments, the microbial consortium consists of a microbial consortium designated as “Microbial Consortium 1” (Consortia 1 as set forth in Table 3), “Microbial Consortium 2” (Consortia 2 as set forth in Table 3), “Microbial Consortium 3 (Consortia 3 as set forth in Table 3), “Microbial Consortium 4” (Consortia 4 as set forth in Table 3), “Microbial Consortium 5” (Consortia 5 as set forth in Table 3), “Microbial Consortium 6” (Consortia 6 as set forth in Table 3), or “Microbial Consortium 7” (Consortia 7 as set forth in Table 3).

[0241] In certain embodiments, the consortia comprises or consists of Ruminococcus FBI01839, Parabacteroides distasonis, Blautia caecimuris, Longibaculum muris, Streptococcus salivarius, Blautia wexlerae FBI01866, Blautia massiliensis, Alistipes putredinis, Akkermansia muciniphila, Faecalimonas umbilicata, Clostridium scindens, Bacteroides cellulosilyticus, Eggerthella lenta, Monoglobus pectinilyticus, Gordonibacter urolithinfaciens, Bacteroides ovatus, Bacteroides thetaiotaomicron, Bacteroides uniformis FBI02083, Enterococcus avium, Streptococcus mutans, Bacteroides uniformis FBI02111, Phocaeicola dorei, Streptococcus parasanguinis, Streptococcus FBI02176, Streptococcus parasanguinis, Enterococcus gallinarum, Streptococcus gallolyticus, Thomasclavelia ramose, Bacteroides thetaiotaomicron, Lactonifactor FBI02339, UBA1417 FBI02365, Alistipes onderdonkii, Veillonella atypica FBI02412, Extibacter hylemonae, Odoribacter FBI02593, and Bacteroides stercoris.

[0242] In certain embodiments, the consortia comprises or consists of FBI01839, FBI01840, FBI01848, FBI01859, FBI01863, FBI01866, FBI01876, FBI01883, FBI01900, FBI01907, FBI01925, FBI01930, FBI01952, FBI01956, and FBI01957, followed by FBI02069, FBI02074, FBI02083, FBI02101, FBI02106, FBI02111, FBI02144, FBI02158, FBI02176, FBI02208, FBI02271, FBI02288, FBI02305, FBI02325, FBI02339, FBI02365, FBI02408, FBI02412, FBI02555, FBI02593, and FBI02695. In certain embodiments, each microbe of this consortia comprises a 16s RNA comprising a nucleotide sequence identified in Table 1.

[0243] In certain embodiments, the consortia comprises or consists of Ruminococcus FBI01839, Parabacteroides distasonis, Blautia caecimuris, Longibaculum muris, Streptococcus salivarius, Blautia wexlerae FBI01866, Blautia massiliensis, Alistipes putredinis, Akkermansia muciniphila, Faecalimonas umbilicate, Clostridium scindens, Bacteroides cellulosilyticus, Eggerthella lenta, Monoglobus pectinilyticus, Gordonibacter urolithinfaciens, Bacteroides ovatus, Bacteroides thetaiotaomicron, Bacteroides uniformis FBI02083, Enterococcus avium, Streptococcus mutans, Bacteroides uniformis FBI02111, Phocaeicola dorei, Streptococcus parasanguinis, Streptococcus FBI02176, Streptococcus parasanguinis, Enterococcus gallinarum, Streptococcus gallolyticus, Thomasclavelia ramosa, Bacteroides thetaiotaomicron, Lactonifactor FBI02339, UBA1417 FBI02365, Alistipes onderdonkii, Veillonella atypica FBI02412, Raoultibacter massiliensis, Flavonifractor plautii, Extibacter hylemonae, Odoribacter FBI02593, and Bacteroides stercoris.

[0244] In certain embodiments, the consortia or consists of FBI01839, FBI01840, FBI01848, FBI01859, FBI01863, FBI01866, FBI01876, FBI01883, FBI01900, FBI01907, FBI01925, FBI01930, FBI01952, FBI01956, FBI01957, FBI02069, FBI02074, FBI02083, FBI02101, FBI02106, FBI02111, FBI02144, FBI02158, FBI02176, FBI02208, FBI02271, FBI02288, FBI02305, FBI02325, FBI02339, FBI02365, FBI02408, FBI02412, FBI02417, FBI02538, FBI02555, FBI02593, and FBI02695. In certain embodiments, each microbe of this comprises a 16s RNA comprising a nucleotide sequence identified in Table 1.

[0245] In certain embodiments, the consortia comprises or consists of Ruminococcus FBI01839, Parabacteroides distasonis, Blautia caecimuris, Longibaculum muris, Blautia massiliensis, Alistipes putredinis, Akkermansia muciniphila, Faecalimonas umbilicata, Clostridium scindens, Bacteroides cellulosilyticus, Eggerthella lenta, Monoglobus pectinilyticus, Gordonibacter urolithinfaciens, Bacteroides ovatus, Bacteroides thetaiotaomicron, Bacteroides uniformis FBI02083, Bacteroides uniformis FBI02111, Phocaeicola dorei, Thomasclavelia ramosa, Bacteroides thetaiotaomicron, Lactonifactor FBI02339, UBA1417 FBI02365, Alistipes onderdonkii, Veillonella atypica FBI02412, Raoultibacter massiliensis, Flavonifractor plautii, Extibacter hylemonae, Odoribacter FBI02593, and Bacteroides stercoris.

[0246] In certain embodiments, the consortia comprises or consists of BI01839, FBI01840, FBI01848, FBI01859, FBI01876, FBI01883, FBI01900, FBI01907, FBI01925, FBI01930, FBI01952, FBI01956, FBI01957, FBI02069, FBI02074, FBI02083, FBI02111, FBI02144, FBI02305, FBI02325, FBI02339, FBI02365, FBI02408, FBI02412, FBI02417, FBI02538, FBI02555, FBI02593, and FBI02695. In certain embodiments, each microbe of this consortia comprises a 16s RNA comprising a nucleotide sequence identified in Table 1.

[0247] In certain embodiments, the consortia comprises or consists of Ruminococcus FBI01839, Parabacteroides distasonis, Blautia caecimuris, Longibaculum muris, Blautia massiliensis, Alistipes putredinis, Akkermansia muciniphila, Faecalimonas umbilicata, Clostridium scindens, Bacteroides cellulosilyticus, Eggerthella lenta, Monoglobus pectinilyticus, Gordonibacter urolithinfaciens, Bacteroides ovatus, Bacteroides thetaiotaomicron, Bacteroides uniformis FBI02083, Bacteroides uniformis FBI02111, Phocaeicola dorei, Thomasclavelia ramosa, Bacteroides thetaiotaomicron, Lactonifactor FBI02339, UBA1417 FBI02365, Alistipes onderdonkii, Veillonella atypica FBI02412, Raoultibacter massiliensis, Flavonifractor plautii, Extibacter hylemonae, Odoribacter FBI02593, Bacteroides stercoris, and Faecalibacterium prausnitzii.

[0248] In certain embodiments, the consortia comprises or consists of BI01839, FBI01840, FBI01848, FBI01859, FBI01876, FBI01883, FBI01900, FBI01907, FBI01925, FBI01930, FBI01952, FBI01956, FBI01957, FBI02069, FBI02074, FBI02083, FBI02111, FBI02144, FBI02305, FBI02325, FBI02339, FBI02365, FBI02408, FBI02412, FBI02417, FBI02538, FBI02555, FBI02593, FBI02695, and FBI02902. In certain embodiments, each microbe of this consortia comprises a 16s RNA comprising a nucleotide sequence identified in Table 1.

[0249] In certain embodiments, the consortia comprises or consists of Ruminococcus FBI01839, Parabacteroides distasonis, Blautia caecimuris, Longibaculum muris, Blautia massiliensis, Alistipes putredinis, Akkermansia muciniphila, Faecalimonas umbilicata, Clostridium scindens, Bacteroides cellulosilyticus, Eggerthella lenta, Monoglobus pectinilyticus, Gordonibacter urolithinfaciens, Bacteroides ovatus, Bacteroides thetaiotaomicron, Bacteroides uniformis FBI02083, Bacteroides uniformis FBI02111, Phocaeicola dorei, Thomasclavelia ramosa, Bacteroides thetaiotaomicron, Lactonifactor FBI02339, UBA1417 FBI02365, Alistipes onderdonkii, Veillonella atypica FBI02412, Raoultibacter massiliensis, Flavonifractor plautii, Extibacter hylemonae, Odoribacter FBI02593, Bacteroides stercoris, Blautia wexlerae FBI01861, Enterocloster clostridioformis, Hungatella hathewayii, Scatavimonas FBI02887, Ruminococcus gnavus, Enterocloster bolteae, Blautia FBI02891, Bacteroides finegoldii, Luoshenia tenuis, Bacteroides caccae, Phocaeicola vulgatus, Parabacteroides merdae, Lacticaseibacillus paracasei, Oliverpabstia intestinalis, Faecalibacterium prausnitzii, Bifidobacterium longum, Bifidobacterium bifidum, Lawsonibacter asaccharolyticus, Bifidobacterium dentium, and Veillonella atypica FBI02908.

[0250] In certain embodiments, the consortia comprises or consists of FBI01839, FBI01840, FBI01848, FBI01859, FBI01861, FBI01876, FBI01883, FBI01900, FBI01907, FBI01925, FBI01930, FBI01952, FBI01956, FBI01957, FBI02069, FBI02074, FBI02083, FBI02111, FBI02144, FBI02305, FBI02325, FBI02339, FBI02365, FBI02408, FBI02412, FBI02417, FBI02538, FBI02555, FBI02593, FBI02695, FBI02882, FBI02884, FBI02887, FBI02888, FBI02890, FBI02891, FBI02893, FBI02894, FBI02895, FBI02896, FBI02897, FBI02898, FBI02899, FBI02900, FBI02902, FBI02903, FBI02904, FBI02905, FBI02906, and FBI02908. In certain embodiments, each microbe of this consortia comprises a 16s RNA comprising a nucleotide sequence identified in Table 1.

[0251] In certain embodiments, the consortia comprises or consists of Ruminococcus FBI01839, Parabacteroides distasonis, Blautia caecimuris, Longibaculum muris, Blautia wexlerae, Blautia massiliensis, Alistipes putredinis, Akkermansia muciniphila, Faecalimonas umbilicata, Clostridium scindens, Bacteroides cellulosilyticus, Eggerthella lenta, Monoglobus pectinilyticus, Gordonibacter urolithinfaciens, Bacteroides ovatus, Bacteroides thetaiotaomicron, Bacteroides uniformis, Enterococcus avium, Phocaeicola dorei, Thomasclavelia ramosa, Lactonifactor FBI02339, UBA1417 FBI02365, Alistipes onderdonkii, Veillonella atypica, Raoultibacter massiliensis, Flavonifractor plautii, Extibacter hylemonae, Odoribacter FBI02593, Bacteroides stercoris, Enterocloster clostridioformis, Hungatella hathewayii, Scatavimonas FBI02887, Ruminococcus gnavus, Enterocloster bolteae, Blautia FBI02891, Bacteroides finegoldii, Luoshenia tenuis, Bacteroides caccae, Phocaeicola vulgatus, Parabacteroides merdae, Lacticaseibacillus paracasei, Oliverpabstia intestinalis, Faecalibacterium prausnitzii, Bifidobacterium longum, Bifidobacterium bifidum, Lawsonibacter asaccharolyticus, Bifidobacterium dentium, and Veillonella atypica.

[0252] In certain embodiments, the consortia comprises or consists of FBI01839, FBI01840, FBI01848, FBI01859, FBI01861, FBI01876, FBI01883, FBI01900, FBI01907, FBI01925, FBI01930, FBI01952, FBI01956, FBI01957, FBI02069, FBI02074, FBI02083, FBI02101, FBI02111, FBI02144, FBI02305, FBI02325, FBI02339, FBI02365, FBI02408, FBI02412, FBI02417, FBI02538, FBI02555, FBI02593, FBI02695, FBI02882, FBI02884, FBI02887, FBI02888, FBI02890, FBI02891, FBI02893, FBI02894, FBI02895, FBI02896, FBI02897, FBI02898, FBI02899, FBI02900, FBI02902, FBI02903, FBI02904, FBI02905, FBI02906, and FBI02908. In certain embodiments, each microbe of this consortia comprises a 16s RNA comprising a nucleotide sequence identified in Table 1.

[0253] In certain embodiments, the consortia comprises or consists of Ruminococcus FBI01839, Parabacteroides distasonis, Blautia caecimuris, Longibaculum muris, Blautia massiliensis, Alistipes putredinis, Akkermansia muciniphila, Faecalimonas umbilicata, Clostridium scindens, Bacteroides cellulosilyticus, Eggerthella lenta, Monoglobus pectinilyticus, Gordonibacter urolithinfaciens, Bacteroides ovatus, Bacteroides thetaiotaomicron, Bacteroides uniformis, Phocaeicola dorei, Thomasclavelia ramosa, Lactonifactor FBI02339, UBA1417 FBI02365, Alistipes onderdonkii, Veillonella atypica, Raoultibacter massiliensis, Flavonifractor plautii, Extibacter hylemonae, Odoribacter FBI02593, Bacteroides stercoris, Enterocloster clostridioformis, Hungatella hathewayii, Scatavimonas FBI02887, Ruminococcus gnavus, Enterocloster bolteae, Blautia FBI02891, Bacteroides finegoldii, Luoshenia tenuis, Bacteroides caccae, Phocaeicola vulgatus, Parabacteroides merdae, Lacticaseibacillus paracasei, Oliverpabstia intestinalis, Faecalibacterium prausnitzii, Bifidobacterium longum, Bifidobacterium bifidum, Lawsonibacter asaccharolyticus, Bifidobacterium dentium, and Veillonella atypica.

[0254] In certain embodiments, the consortia comprises or consists of FBI01839, FBI01840, FBI01848, FBI01859, FBI01876, FBI01883, FBI01900, FBI01907, FBI01925, FBI01930, FBI01952, FBI01956, FBI01957, FBI02069, FBI02074, FBI02083, FBI02111, FBI02144, FBI02305, FBI02325, FBI02339, FBI02365, FBI02408, FBI02412, FBI02417, FBI02538, FBI02555, FBI02593, FBI02695, FBI02882, FBI02884, FBI02887, FBI02888, FBI02890, FBI02891, FBI02893, FBI02894, FBI02895, FBI02896, FBI02897, FBI02898, FBI02899, FBI02900, FBI02902, FBI02903, FBI02904, FBI02905, FBI02906, and FBI02908. In certain embodiments, each microbe of this consortia comprises a 16s RNA comprising a nucleotide sequence identified in Table 1.

[0255] The present disclosure provides microbial consortia 7 of Table 3. The relevance of the microbial consortia 7 of Table 3 with respect to therapeutic effect is such that the composition may include those microbial species of consortia 7 of Table 3 as the only microbial species in the composition. Consequently, the present disclosure provides microbial consortia comprising or consisting of Ruminococcus FBI01839, Parabacteroides distasonis, Blautia caecimuris, Longibaculum muris, Blautia massiliensis, Alistipes putredinis, Akkermansia muciniphila, Faecalimonas umbilicata, Clostridium scindens, Bacteroides cellulosilyticus, Eggerthella lenta, Monoglobus pectinilyticus, Gordonibacter urolithinfaciens, Bacteroides ovatus, Bacteroides thetaiotaomicron, Bacteroides uniformis, Phocaeicola dorei, Thomasclavelia ramosa, Lactonifactor FBI02339, UBA1417 FBI02365, Alistipes onderdonkii, Veillonella atypica, Raoultibacter massiliensis, Flavonifractor plautii, Extibacter hylemonae, Odoribacter FBI02593, Bacteroides stercoris, Enterocloster clostridioformis, Hungatella hathewayii, Scatavimonas FBI02887, Ruminococcus gnavus, Enterocloster bolteae, Blautia FBI02891, Bacteroides finegoldii, Luoshenia tenuis, Bacteroides caccae, Phocaeicola vulgatus, Parabacteroides merdae, Lacticaseibacillus paracasei, Oliverpabstia intestinalis, Faecalibacterium prausnitzii, Bifidobacterium longum, Bifidobacterium bifidum, Lawsonibacter asaccharolyticus, Bifidobacterium dentium, and Veillonella atypica. Alternatively, the present disclosure provides microbial consortia comprising or consisting of FBI01839, FBI01840, FBI01848, FBI01859, FBI01876, FBI01883, FBI01900, FBI01907, FBI01925, FBI01930, FBI01952, FBI01956, FBI01957, FBI02069, FBI02074, FBI02083, FBI02111, FBI02144, FBI02305, FBI02339, FBI02365, FBI02408, FBI02412, FBI02417, FBI02538, FBI02555, FBI02593, FBI02695, FBI02882, FBI02884, FBI02887, FBI02888, FBI02890, FBI02891, FBI02893, FBI02894, FBI02895, FBI02896, FBI02897, FBI02898, FBI02899, FBI02900, FBI02902, FBI02903, FBI02904, FBI02905, FBI02906, and FBI02908.

[0256] In certain embodiments, the microbial consortia of the present disclosure provide engraftment in recipients and can provide health and therapeutic benefits under certain conditions. In certain embodiments, the microbial consortia of the present disclosure are comprised of bacterial with survival and growth properties that are similar to those exemplified in the Examples.

[0257] In certain embodiments, a microbial consortium comprises 2 to 500 microbial species. For example, in certain non-limiting embodiments, a microbial consortium comprises 3 to 500, 4 to 500, 5 to 500, 6 to 500, 7 to 500, 8 to 500, 9 to 500, 10 to 500, 11 to 500, 12 to 500, 13 to 500, 14 to 500, 15 to 500, 16 to 500, 17 to 500, 18 to 500, 19 to 500, 20 to 500, 21 to 500, 22 to 500, 23 to 500, 24 to 500, 25 to 500, 30 to 500, 35 to 500, 40 to 500, 45 to 500, 50 to 500, 60 to 500, 70 to 500, 80 to 500, 90 to 500, 100 to 500, 110 to 500, 120 to 500, 130 to 500, 140 to 500, 150 to 500, 160 to 500, 170 to 500, 180 to 500, 190 to 500, 200 to 500, 210 to 500, 220 to 500, 230 to 500, 240 to 500, 250 to 500, 260 to 500, 270 to 500, 280 to 500, 290 to 500, 300 to 500, 400 to 500, 3 to 300, 4 to 300, 5 to 300, 6 to 300, 7 to 300, 8 to 300, 9 to 300, 10 to 300, 11 to 300, 12 to 300, 13 to 300, 14 to 300, 15 to 300, 16 to 300, 17 to 300, 18 to 300, 19 to 300, 20 to 300, 21 to 300, 22 to 300, 23 to 300, 24 to 300, 25 to 300, 30 to 300, 35 to 300, 40 to 300, 45 to 300, 50 to 300, 60 to 300, 70 to 300, 80 to 300, 90 to 300, 100 to 300, 110 to 300, 120 to 300, 130 to 300, 140 to 300, 150 to 300, 160 to 300, 170 to 300, 180 to 300, 190 to 300, 200 to 300, 210 to 300, 220 to 300, 230 to 300, 240 to 300, 250 to 300, 260 to 300, 270 to 300, 280 to 300, 290 to 300, 3 to 250, 4 to 250, 5 to 250, 6 to 250, 7 to 250, 8 to 250, 9 to 250, 10 to 250, 11 to 250, 12 to 250, 13 to 250, 14 to 250, 15 to 250, 16 to 250, 17 to 250, 18 to 250, 19 to 250, 20 to 250, 21 to 250, 22 to 250, 23 to 250, 24 to 250, 25 to 250, 30 to 250, 35 to 250, 40 to 250, 45 to 250, 50 to 250, 60 to 250, 70 to 250, 80 to 250, 90 to 250, 100 to 250, 110 to 250, 120 to 250, 130 to 250, 140 to 250, 150 to 250, 160 to 250, 170 to 250, 180 to 250, 190 to 250, 200 to 250, 210 to 250, 220 to 250, 230 to 250, 240 to 250, 3 to 200, 4 to 200, 5 to 200, 6 to 200, 7 to 200, 8 to 200, 9 to 200, 10 to 200, 11 to 200, 12 to 200, 13 to 200, 14 to 200, 15 to 200, 16 to 200, 17 to 200, 18 to 200, 19 to 200, 20 to 200, 21 to 200, 22 to 200, 23 to 200, 24 to 200, 25 to 200, 30 to 200, 35 to 200, 40 to 200, 45 to 200, 50 to 200, 60 to 200, 70 to 200, 80 to 200, 90 to 200, 100 to 200, 110 to 200, 120 to 200, 130 to 200, 140 to 200, 150 to 200, 160 to 200, 170 to 200, 180 to 200, 190 to 200, 3 to 150, 4 to 150, 5 to 150, 6 to 150, 7 to 150, 8 to 150, 9 to 150, 10 to 150, 11 to 150, 12 to 150, 13 to 150, 14 to 150, 15 to 150, 16 to 150, 17 to 150, 18 to 150, 19 to 150, 20 to 150, 21 to 150, 22 to 150, 23 to 150, 24 to 150, 25 to 150, 30 to 150, 35 to 150, 40 to 150, 45 to 150, 50 to 150, 60 to 150, 70 to 150, 80 to 150, 90 to 150, 100 to 150, 110 to 150, 120 to 150, 130 to 150, 140 to 150, 3 to 100, 4 to 100, 5 to 100, 6 to 100, 7 to 100, 8 to 100, 9 to 100, 10 to 100, 11 to 100, 12 to 100, 13 to 100, 14 to 100, 15 to 100, 16 to 100, 17 to 100, 18 to 100, 19 to 100, 20 to 100, 21 to 100, 22 to 100, 23 to 100, 24 to 100, 25 to 100, 30 to 100, 35 to 100, 40 to 100, 45 to 100, 50 to 100, 60 to 100, 70 to 100, 80 to 100, 90 to 100, 3 to 75, 4 to 75, 5 to 75, 6 to 75, 7 to 75, 8 to 75, 9 to 75, 10 to 75, 11 to 75, 12 to 75, 13 to 75, 14 to 75, 15 to 75, 16 to 75, 17 to 75, 18 to 75, 19 to 75, 20 to 75, 21 to 75, 22 to 75, 23 to 75, 24 to 75, 25 to 75, 30 to 75, 35 to 75, 40 to 75, 45 to 75, 50 to 75, 60 to 75, 70 to 75, 3 to 50, 4 to 50, 5 to 50, 6 to 50, 7 to 50, 8 to 50, 9 to 50, 10 to 50, 11 to 50, 12 to 50, 13 to 50, 14 to 50, 15 to 50, 16 to 50, 17 to 50, 18 to 50, 19 to 50, 20 to 50, 21 to 50, 22 to 50, 23 to 50, 24 to 50, 25 to 50, 30 to 50, 35 to 50, 40 to 50, 45 to 50, 3 to 25, 4 to 25, 5 to 25, 6 to 25, 7 to 25, 8 to 25, 9 to 25, 10 to 25, 11 to 25, 12 to 25, 13 to 25, 14 to 25, 15 to 25, 16 to 25, 17 to 25, 18 to 25, 19 to 25, 20 to 25, 21 to 25, 22 to 25, 23 to 25, or 24 to 25 microbial species. For example, in certain non-limiting embodiments, a microbial consortium comprises about 20 to about 200, about 70 to about 80, about 80 to about 90, about 100 to about 110, or about 150 to about 160 microbial species.

[0258] In certain embodiments, a microbial consortium described herein comprises a microbial species having a relative abundance of approximately 90%, 80%, 70%, 60%, 50%, 40%, 30%, 20%, 10%, 5%, 1%, 0.1%, 0.01%, 0.001%, 0.0001%, 0.00001%, or 0.000001% of the total microbial consortium. In certain embodiments, the relative abundance of a microbial species is determined, for example, by metagenomic sequencing, High Phylogenetic Resolution microbiome mapping by Fluorescence in situ Hybridization (HiPR-FISH), quantitative PCR (qPCR), or droplet digital PCR, and calculated as the percentage of reads that are classified as an identified microbial species, divided by the genome size or the counted number of bacterial of particular taxa divided by the total counted number of bacteria. For example, in certain non-limiting embodiments, the relative abundance of a microbial species is determined, for example, by metagenomic shotgun sequencing, HiPR-FISH, or qPCR.

### Functionally Equivalent and Identical Drug Products

[0259] The strains included in each microbial consortia disclosed herein (e.g., Consortia 1, Consortia 2, Consortia 3, Consortia 4, Consortia 5, Consortia 6, and Consortia 7, each as set forth in Table 3) are described herein by 16S RNA sequences and functional characteristics. In certain embodiments, equivalent consortia of Consortia 1-7 can be generated by screening multiple of the same strain to find equivalent strains with equivalent function to those that comprise Consortia 1-7, respectively. Accordingly, in certain embodiments identical strains may theoretically have different functions, strains can be screened using 16S RNA and Biolog to identify functionally identical and equivalent strains from any fecal collection using the methods of collection described herein.

[0260] In certain embodiments, each microbial consortium disclosed herein (e.g., Consortia 1-7, each as set forth in Table 3) was articulately designed to have multiple of the same strain in the Consortium. In certain embodiments, this provides a benefit of redundancy to ensure function. In certain embodiments, redundancy is not required for equivalent function so long as one of the otherwise redundant strains is included in the final drug product at a sufficient viable cell count amount to achieve in vivo function in a subject. Accordingly, a Consortium that is equivalent or identical to a microbial consortium disclosed herein (e.g., Consortia 1-7, each as set forth in Table 3) may contain all redundancies or alternatively may contain no or fewer redundancies per strain so long as the included strains achieve in vivo function in a subject.

[0261] In certain embodiments, the microbial consortium comprises or consists of strains having identical functions to the strains of any of Consortia 17, each as set forth in Table 3. In certain embodiments, the microbial consortium comprises or consists of strains functionally equivalent to the strains of any of Consortia 17, each as set forth in Table 3. In certain embodiments, the microbial consortium comprises or consists of strains having substantially identical functions to the strains of any of Consortia 17, each as set forth in Table 3. In certain embodiments, the microbial consortium comprises or consists of strains producing the same metabolites as the strain of any of Consortia 17, each as set forth in Table 3. In certain embodiments, the microbial consortium comprises or consists of strains producing substantially the same metabolites as the strain of any of Consortia 17, each as set forth in Table 3.

### Methods of Treatment

[0262] The present disclosure provides methods of treatment using any of the microbial consortia disclosed herein. The methods are useful for treating cancer patients and those in need of slowing tumor growth or reducing tumor size. Such treatments can be useful as a standalone therapy, as a neo-adjuvant therapy, or in combination with immunotherapy (e.g., immune checkpoint inhibitors (ICI), T-cell therapy (e.g., tumor infiltrating lymphocyte (TIL) therapy or CAR-T therapy), monoclonal antibodies, treatment vaccines, and immune system modulators). In certain embodiment, a microbial consortium of the present disclosure is administered to a cancer patient who is being treated with an ICI, for example and without any limitation, anti-PD1 therapies (e.g., pembrolizumab, nivolumab, or cemiplimab), anti PD-L1 therapies (e.g., atezolizumab, avelumab, and durvalumab), and anti-CTLA-4 therapies (e.g., ipilimumab and tremelimumab)). Treatment with a microbial consortium can precede immunotherapy by 1-2 weeks or could be administered contemporaneously. A microbial consortium of the present disclosure could also be administered in combination with chemotherapy or radiation therapy (see Kalasbail et al., Cancers (Basel) 13(18): 4623, Sep. 15, 2021; Liu et al., Genomics Proteomics Bioinformatics 21(1): 84-96, Jul. 30, 2022; Yu et al., Cancers (Basel) 14(22): 5685, Nov. 19, 2022).

[0263] In certain embodiments, with respect to patient eligibility, individuals suitable for treatment include those who have previously failed immune checkpoint inhibitor (ICI) therapy, as well as those initiating ICI therapy for the first time. Non-limiting clinical indications include conditions in which immune system functionality is important to therapeutic response including, for example but without any limitations, cancers for which ICI therapy is established yet associated with a substantial proportion of non-responders.

[0264] In certain embodiments, the presently disclosed methods and compositions can be used for the treatment of neoplastic diseases, including but not limited to benign, malignant, metastatic, and non-metastatic neoplasms, tumors, and cancers. The presently disclosed methods and compositions can be used for the treatment of neoplastic conditions at any stage (e.g., I-V) or grade (e.g., G1-G3), including those that are progressing, worsening, stabilized, or in remission. Cancers treatable according to the present disclosure encompass a wide range of anatomical origins, including but not limited to the bladder, blood, bone, bone marrow, brain, breast, colon, esophagus, gastrointestinal tract, gum, head, kidney, liver, lung, nasopharynx, neck, ovary, prostate, skin, stomach, testis, tongue, and uterus. Histological types include, without limitation, carcinomas (e.g., squamous cell, basal cell, papillary, adenocarcinoma), sarcomas (e.g., fibrosarcoma, liposarcoma, osteosarcoma), melanomas, lymphomas, leukemias, and mixed tumors. In certain embodiments, the tumor or cancer is selected from prostate cancer, liver cancer, renal cancer, lung cancer, breast cancer, colorectal cancer, pancreatic cancer, brain cancer, hepatocellular carcinoma, lymphoma, leukemia, gastric cancer, cervical cancer, ovarian cancer, thyroid cancer, melanoma, head and neck cancer, skin cancer, and soft tissue sarcoma. In certain embodiments, the tumor or cancer is metastatic or malignant.

[0265] Additional exemplary indications include, without limitation, melanoma, mismatch repair-deficient/microsatellite instability-high (dMMR/MSI-H) colorectal cancer, non-small cell lung cancer, renal cell carcinoma, head and neck squamous cell carcinoma, urothelial carcinoma, cervical cancer, and triple-negative breast cancer.

[0266] In certain embodiments, the methods of treatment disclosed herein are useful for patients experiencing adverse effects associated with other cancer therapies, including, without limitation, gastrointestinal complications such as treatment-induced colitis. Mitigation of such side effects can enable patients to maintain the primary cancer therapy, for example, immune checkpoint inhibitor (ICI) therapy, for an extended duration, thereby potentially improving clinical outcomes.

[0267] In certain embodiments, screening for treatment eligibility can include individuals exhibiting suboptimal microbiome profiles, such as those characterized by low microbial diversity, the presence of pathogens or pathobionts, and/or microbiomes significantly divergent from a microbial consortium of the present invention. However, such characteristics are not required. In certain embodiments, patients can avoid concomitant administration of proton pump inhibitors (PPIs), corticosteroids, and/or antibiotics during treatment. In certain embodiments, individuals with a recent history of microbiome-modifying interventions, including antibiotic or PPI use, may be particularly suited for the therapeutic methods described herein.

[0268] Further embodiments include patients with disrupted microbiomes, such as those undergoing colonoscopy following bowel preparation. The treatment can also be applicable to patients requiring hormone therapy or other interventions that impact microbiome composition.

[0269] In certain embodiments, the route of administration is oral, for example, via capsule or tablet. Alternative routes of delivery can include colonoscopic administration. Additional non-limiting alternatives include rectal suppository or administration via nasogastric tube.

[0270] Pre-treatment can optionally include antibiotic administration and/or colonic lavage using polyethylene glycol (PEG) or other suitable laxatives. In certain embodiments, post-treatment protocols provide that patients avoid the use of corticosteroids, proton pump inhibitors (PPIs), and/or antibiotics. Post-treatment can further include administration of loperamide or a similar agent to reduce rapid expulsion of the microbial consortium disclosed herein.

[0271] In certain embodiments, both the product and the treatment regimen are configured to support immune checkpoint inhibitor (ICI) therapy. Post-treatment microbiome diversity may represent a critical component of therapeutic success, and the product is formulated to promote such diversity. In certain embodiments, antibiotics are not administered. In certain embodiments when antibiotics are administered, reinstating a diverse microbiome following antibiotic exposure can be beneficial.

[0272] In certain embodiments, the formulation and route of delivery are modified to support robust microbial engraftment. For example, but without any limitation, frozen formulations delivered via colonoscopy can be used based on their demonstrated enhanced engraftment. Identification of key strains associated with response to ICI therapy can be facilitated using high-resolution platforms such as HiPR-FISH. In certain embodiments, a superdonor provided three samples collected across multiple timepoints, enabling identification of strains common to these samples, which can be prioritized for inclusion in the microbial consortia.

[0273] In certain embodiments, a Microbial Consortium disclosed herein (e.g., Consortia 1-7, each as set forth in Table 3) is administered as a single dose or as multiple doses. In certain embodiments, a Microbial Consortium disclosed herein (e.g., Consortia 1-7, each as set forth in Table 3) is administered once a day for 2 days, 3 days, 4 days, 5 days, 6 days, 1 week, 2 weeks 3 weeks, 1 month, 2 months, 3 months, 4 months, 5 months, 6 months, or 1 year. In certain embodiments, a Microbial Consortium disclosed herein (e.g., Consortia 1-7, each as set forth in Table 3) is administered multiple times daily. In certain embodiments, a Microbial Consortium disclosed herein (e.g., Consortia 1-7, each as set forth in Table 3) is administered twice daily, three times daily, 4 times daily, or 5 times daily. In certain embodiments, a Microbial Consortium disclosed herein (e.g., Consortia 1-7, each as set forth in Table 3) is administered intermittently. In certain embodiments, a Microbial Consortium disclosed herein (e.g., Consortia 1-7, each as set forth in Table 3) is administered once weekly, once monthly, or when a subject is in need thereof.

[0274] In certain embodiments, Consortia 7 is administered as a single dose or as multiple doses. In certain embodiments, Consortia 7 is administered once a day for 2 days, 3 days, 4 days, 5 days, 6 days, 1 week, 2 weeks 3 weeks, 1 month, 2 months, 3 months, 4 months, 5 months, 6 months, or 1 year. In certain embodiments, Consortia 7 is administered multiple times daily. In certain embodiments, Consortia 7 is administered twice daily, three times daily, 4 times daily, or 5 times daily. In certain embodiments, Consortia 7 is administered intermittently. In certain embodiments, Consortia 7 is administered once weekly, once monthly, or when a subject is in need thereof.

[0275] In certain embodiments, a Microbial Consortium disclosed herein (e.g., Consortia 1-7, each as set forth in Table 3) is administered at a first loading dose and then followed by maintenance doses. In certain embodiments, the first loading dose is administered for 1 day, 2 days, 3 days, 4 days, 5 days, 6 days, 7 days, 8 days, 9 days, or 10 days. In certain embodiments, the loading dose is administered for 1-3 days. In certain embodiments, the loading dose is administered for 2-4 days. In certain embodiments, the loading dose is administered for 2-3 days. In certain embodiments, the loading dose is administered for 3-5 days. In certain embodiments, the loading dose is administered for 4-6 days. In certain embodiments, the loading dose is administered for 5-7 days. In certain embodiments, the loading dose is administered for 1 day. In certain embodiments, the loading dose is administered for 3 days. In certain embodiments, the loading dose is administered for 2 days.

[0276] In certain embodiments, the loading dose is administered for 1 day, 2 days, 3 days, 4 days, 5 days, 6 days, 7 days, 8 days, 9 days, or 10 days after the immunotherapy. In certain embodiments, the loading dose is administered for 1-3 days after the immunotherapy. In certain embodiments, the loading dose is administered for 2-4 days after the immunotherapy. In certain embodiments, the loading dose is administered for 2-3 days after the immunotherapy. In certain embodiments, the loading dose is administered for 3-5 days after the immunotherapy. In certain embodiments, the loading dose is administered for 4-6 days after the immunotherapy. In certain embodiments, the loading dose is administered for 5-7 days after the immunotherapy. In certain embodiments, the loading dose is administered for 1 day after the immunotherapy. In certain embodiments, the loading dose is administered for 3 days after the immunotherapy. In certain embodiments, the loading dose is administered for 2 days after the immunotherapy.

[0277] In certain embodiments, the loading dose is administered daily for the duration of the immunotherapy administered to the patient.

[0278] In certain embodiments, the loading dose is administered for 1 day, 2 days, 3 days, 4 days, 5 days, 6 days, 7 days, 8 days, 9 days, or 10 days before the immunotherapy. In certain embodiments, the loading dose is administered for 1-3 days before the immunotherapy. In certain embodiments, the loading dose is administered for 2-4 days before the immunotherapy. In certain embodiments, the loading dose is administered for 2-3 days before the immunotherapy. In certain embodiments, the loading dose is administered for 3-5 days before the immunotherapy. In certain embodiments, the loading dose is administered for 4-6 days before the immunotherapy. In certain embodiments, the loading dose is administered for 5-7 days before the immunotherapy. In certain embodiments, the loading dose is administered for 1 day before the immunotherapy. In certain embodiments, the loading dose is administered for 3 days before the immunotherapy. In certain embodiments, the loading dose is administered for 2 days before the immunotherapy.

[0279] In certain embodiments, the loading dose is administered daily before the immunotherapy is administered to the patient.

[0280] In certain embodiments, the maintenance doses are administered for 5-10 days following the last loading dose. In certain embodiments, the maintenance doses are administered for 7-12 days following the last loading dose. In certain embodiments, the maintenance doses are administered for 10-14 days following the last loading dose. In certain embodiments, the maintenance doses are administered for 14-21 days following the last loading dose. In certain embodiments, the maintenance doses are administered for 21-28 days following the last loading dose. In certain embodiments, the maintenance doses are administered for 14 days following the last loading dose. In certain embodiments, the maintenance doses are administered for 21 days following the last loading dose. In certain embodiments, the maintenance doses are administered for 28 days following the last loading dose. In certain embodiments, the maintenance doses are administered for about 8 days following the last loading dose. In certain embodiments, the maintenance doses are administered for about 7 days following the last loading dose. In certain embodiments, the maintenance doses are administered for about 6 days following the last loading dose. In certain embodiments, the maintenance doses are administered for about 9 days following the last loading dose. In certain embodiments, the maintenance doses are administered for about 10 days following the last loading dose. In certain embodiments, the maintenance doses are administered for at least 21 days following the last loading dose. In certain embodiments, the maintenance doses are administered for at least 1 month following the last loading dose. In certain embodiments, the maintenance doses are administered for at least 2 months following the last loading dose. In certain embodiments, the maintenance doses are administered for at least 4 months following the last loading dose. In certain embodiments, the maintenance doses are administered for the maintenance doses are administered for at least 6 months following the last loading dose. In certain embodiments, the maintenance doses are administered for at least 8 months following the last loading dose. In certain embodiments, the maintenance doses are administered for at least 10 months following the last loading dose. In certain embodiments, the maintenance doses are administered for at least 12 months following the last loading dose. In certain embodiments, the maintenance doses are administered for at least 18 months following the last loading dose. In certain embodiments, the maintenance doses are administered for at least 24 months following the last loading dose. In certain embodiments, the loading dose is administered for 2 days and the maintenance dose is administered for 6 days (for a total of a 8-day course of treatment). In certain embodiments, the loading dose is administered for 2 days and the maintenance dose is administered for 7 days (for a total of a 9-day course of treatment). In certain embodiments, the loading dose is administered for 2 days and the maintenance dose is administered for 8 days (for a total of a 10 day course of treatment). In certain embodiments, the loading dose is administered for 9 days and the maintenance dose is administered for 9 days (for a total of a 11 day course of treatment). In certain embodiments, the loading dose is administered for 2 days and the maintenance dose is administered for 10 days (for a total of a 12 day course of treatment).

[0281] In certain embodiments, the loading dose follows the pretreatment with antibiotics as described in the Combination Therapy section below. In certain embodiments, the loading dose follows the pretreatment with a bowel preparation as described in the Combination Therapy section below. In certain embodiments, the loading dose follows the pretreatment with antibiotics and a bowel preparation as described in the Combination Therapy section below.

[0282] In certain embodiments when used in a patient that will receive an immunotherapy including an immune checkpoint inhibitor (ICI), a Microbial Consortium disclosed herein (e.g., Consortia 1-7, each as set forth in Table 3) is administered loading dose before, after, or at the same time as the immunotherapy. In certain embodiments, loading dose is administered 1 day, 2 days, 3 days, 4 days, 5 days, 6 days, 7 days, 8 days, 9 days, or 10 days before the immunotherapy. In certain embodiments, the loading dose is administered 1 day, 2 days, 3 days, 4 days, 5 days, 6 days, 7 days, 8 days, 9 days, or 10 days after the immunotherapy. In certain embodiments, the loading dose is administered at the same time as the immunotherapy. In certain embodiments, the first loading dose is administered for 1 day, 2 days, 3 days, 4 days, 5 days, 6 days, 7 days, 8 days, 9 days, or 10 days. In certain embodiments, the loading dose is administered for 1-3 days. In certain embodiments, the loading dose is administered for 2-4 days. In certain embodiments, the loading dose is administered for 2-3 days. In certain embodiments, the loading dose is administered for 3-5 days. In certain embodiments, the loading dose is administered for 4-6 days. In certain embodiments, the loading dose is administered for 5-7 days. In certain embodiments, the loading dose is administered for 1 day. In certain embodiments, the loading dose is administered for 3 days. In certain embodiments, the loading dose is administered for 2 days. In certain embodiments, the maintenance doses are administered for 5-10 days following the last loading dose. In certain embodiments, the maintenance doses are administered for 7-12 days following the last loading dose. In certain embodiments, the maintenance doses are administered for 10-14 days following the last loading dose. In certain embodiments, the maintenance doses are administered for 14-21 days following the last loading dose. In certain embodiments, the maintenance doses are administered for 21-28 days following the last loading dose. In certain embodiments, the maintenance doses are administered for 14 days following the last loading dose. In certain embodiments, the maintenance doses are administered for 21 days following the last loading dose. In certain embodiments, the maintenance doses are administered for 28 days following the last loading dose. In certain embodiments, the maintenance doses are administered for at least 21 days following the last loading dose. In certain embodiments, the maintenance doses are administered for at least 1 month following the last loading dose. In certain embodiments, the maintenance doses are administered for at least 2 months following the last loading dose. In certain embodiments, the maintenance doses are administered for at least 4 months following the last loading dose. In certain embodiments, the maintenance doses are administered for the maintenance doses are administered for at least 6 months following the last loading dose. In certain embodiments, the maintenance doses are administered for at least 8 months following the last loading dose. In certain embodiments, the maintenance doses are administered for at least 10 months following the last loading dose. In certain embodiments, the maintenance doses are administered for at least 12 months following the last loading dose. In certain embodiments, the maintenance doses are administered for at least 18 months following the last loading dose. In certain embodiments, the maintenance doses are administered for at least 24 months following the last loading dose. In certain embodiments, the maintenance doses are administered for about 8 days following the last loading dose. In certain embodiments, the maintenance doses are administered for about 7 days following the last loading dose. In certain embodiments, the maintenance doses are administered for about 6 days following the last loading dose. In certain embodiments, the maintenance doses are administered for about 9 days following the last loading dose. In certain embodiments, the maintenance doses are administered for about 10 days following the last loading dose. In certain embodiments, the loading dose is administered for 2 days and the maintenance dose is administered for 6 days (for a total of a 8-day course of treatment). In certain embodiments, the loading dose is administered for 2 days and the maintenance dose is administered for 7 days (for a total of a 9-day course of treatment). In certain embodiments, the loading dose is administered for 2 days and the maintenance dose is administered for 8 days (for a total of a 10 day course of treatment). In certain embodiments, the loading dose is administered for 9 days and the maintenance dose is administered for 9 days (for a total of a 11 day course of treatment). In certain embodiments, the loading dose is administered for 2 days and the maintenance dose is administered for 10 days (for a total of a 12 day course of treatment). In certain embodiments, the loading dose follows the pretreatment with antibiotics as described in the Combination Therapy section below. In certain embodiments, the loading dose follows the pretreatment with a bowel preparation as described in the Combination Therapy section below. In certain embodiments, the loading dose follows the pretreatment with antibiotics and a bowel preparation as described in the Combination Therapy section below.

[0283] In certain embodiments, a Consortia is administered at a loading dose and then followed by maintenance doses. In certain embodiments, the loading dose comprises about 10¹² viable cells. In certain embodiments, the loading dose comprises one or more coated enteric capsules. In certain embodiments, the one or more coated enteric capsules comprise about 10¹¹ viable cells. In certain embodiments, the loading dose comprises 10 coated enteric capsules. In certain embodiments, the loading dose is administered for 1 day. In certain embodiments, the loading dose is administered twice a day. In certain embodiments, the maintenance dose comprises about 2×10¹¹ viable cells. In certain embodiments, each maintenance dose comprises one or more coated enteric capsules. In certain embodiments, the one or more coated enteric capsules comprise about 10¹¹ viable cells. In certain embodiments, each maintenance dose comprises 2 coated enteric capsules. In certain embodiments, the maintenance doses are administered for 2 days, 3 days, 4 days, 5 days, 6 days, 7 days, 8 days, 9 days, 10 days, 11 days, 12 days, 13 days, 2 weeks, 3 weeks, 4 weeks, 5 weeks, 6 weeks, 8 weeks, 10 weeks, or 12 weeks following the last loading dose.

[0284] In certain embodiments, each capsule contains a range of 5×10¹⁰ to 5×10¹¹ viable cells/capsule. In certain embodiments, each capsule contains a range of 5×10⁹ to 5×10¹⁰ viable cells/capsule. In certain embodiments, each capsule contains a range of 5×10¹¹ to 5×10¹² viable cells/capsule. In certain embodiments, maltodextrin is included as an excipient in the capsules.

[0285] In certain embodiments, a Microbial Consortium disclosed herein (e.g., Consortia 1-7, each as set forth in Table 3) can be administered via an enteric route. For example, in certain non-limiting embodiments, a microbial consortium is administered orally, rectally (e.g., by enema, suppository, or colonoscope), or by oral or nasal tube.

[0286] In certain embodiments, a Microbial Consortium disclosed herein (e.g., Consortia 1-7, each as set forth in Table 3) is administered orally. In certain embodiments, the oral administration is by a powder. In certain embodiments, the oral administration is by a slurry. In certain embodiments, the oral administration is by pills or capsules.

[0287] In certain embodiments, a Microbial Consortium disclosed herein (e.g., Consortia 1-7, each as set forth in Table 3) can be administered to a specific location along the gastrointestinal tract. For example, in certain non-limiting embodiments, a microbial consortium can be administered into one or more gastrointestinal location including the mouth, esophagus, stomach, small intestine (duodenum, jejunum, ileum), large intestine (cecum, ascending colon, transverse colon, descending colon), or rectum. In certain embodiments, a microbial consortium can be administered in all regions of the gastrointestinal tract.

### Immunotherapies

[0288] In certain embodiments, the presently disclosed microbial consortia can be administered with an immunotherapy. In certain embodiments, the immunotherapy is an immune checkpoint inhibitor (ICI). Examples of ICIs include, but are not limited to, antagonists of the PD-1, PD L1, CTLA-4, BTLA, TIM3, LAG-3, TIGIT, B7-H3, VISTA, or ICOS pathways. In certain embodiments, the ICI comprises an anti-PD1 antibody, an anti-PD-L1 antibody, an anti-CTLA-4 antibody, an anti-BTLA antibody, an anti-TIM3 antibody, an anti-LAG-3 antibody, an anti-LAG-3 antibody, an anti-TIGIT antibody, an anti-B7-H3 antibody, an anti-VISTA antibody, an anti-ICOS antibody, or a combination thereof. In certain embodiments, the ICI comprises an anti-PD1 antibody and an anti-CTLA-4 antibody. In certain embodiments, the ICI is an anti-PD1 antibody, such as pembrolizumab, nivolumab, cemiplimab, dostarlimab, retifanlimab-dlwr, or tislelizumab. In certain embodiments, the ICI is an anti-PD-L1 antibody, such as atezolizumab, avelumab, or durvalumab. In certain embodiments, the ICI is an anti-CTL4 antibody, such as ipilimumab or tremelimumab.

### Combination Therapy

[0289] In certain embodiments, a Microbial Consortium disclosed herein (e.g., Consortia 1-7, each as set forth in Table 3) can be administered in combination with other agents. In certain embodiments, a Microbial Consortium disclosed herein (e.g., Consortia 1-7, each as set forth in Table 3) can be administered with an antimicrobial agent, an antifungal agent, an antiviral agent, an antiparasitic agent, a food, a drink, a probiotic, or a prebiotic. In certain embodiments, a Microbial Consortium disclosed herein (e.g., Consortia 1-7, each as set forth in Table 3) can be administered subsequent to administration of an antimicrobial agent, an antifungal agent, an antiviral agent, an antiparasitic agent or a prebiotic. In certain embodiments, administration may be sequential over a period of hours or days, or simultaneously.

[0290] For example, in certain non-limiting embodiments, a microbial consortium can be administered with, or pre-administered with, one or more antibacterial agent selected from fluoroquinolone antibiotics (ciprofloxacin, Levaquin, floxin, tequin, avelox, and norflox); cephalosporin antibiotics (cephalexin, cefuroxime, cefadroxil, cefazolin, cephalothin, cefaclor, cefamandole, cefoxitin, cefprozil, and ceftobiprole); penicillin antibiotics (amoxicillin, ampicillin, penicillin V, dicloxacillin, carbenicillin, vancomycin, and methicillin); tetracycline antibiotics (tetracycline, minocycline, oxytetracycline, and doxycycline); and carbapenem antibiotics (ertapenem, doripenem, imipenem/cilastatin, and meropenem).

[0291] For example, in certain non-limiting embodiments, a microbial consortium can be administered with one or more antiviral agent selected from Abacavir, Acyclovir, Adefovir, Amprenavir, Atazanavir, Cidofovir, Darunavir, Delavirdine, Didanosine, Docosanol, Efavirenz, Elvitegravir, Emtricitabine, Enfuviltide, Etravirine, Famciclovir, Foscamet, Fomivirsen, Ganciclovir, Indinavir, Idoxuridine, Lamivudine, Lopinavir Maraviroc, MK-2048, Nelfinavir, Nevirapine, Penciclovir, Raltegravir, Rilpivirine, Ritonavir, Saquinavir, Stavudine, Tenofovir Trifluridine, Valaciclovir, Valganciclovir, Vidarabine, Ibacitabine, Amantadine, Oseltamivir, Rimantidine, Tipranavir, Zalcitabine, Zanamivir, and Zidovudine.

[0292] In certain embodiments, a microbial consortium can be administered with one or more antifungal agent selected from miconazole, ketoconazole, clotrimazole, econazole, omoconazole, bifonazole, butoconazole, fenticonazole, isoconazole, oxiconazole, sertaconazole, sulconazole, and tioconazole; triazole antifungals such as fluconazole, itraconazole, isavuconazole, ravuconazole, posaconazole, voriconazok, terconazole, and albaconazole; thiazole antifungals such as abafungin; allylamine antifungals such as terbinafine, naftifine, and butenafine; and echinocandin antifungals such as anidulafungin, caspofungin, and micafungin; polygodial; benzoic acid; ciclopirox; tolnaftate; undecylenic acid; flucytosine or 5-fluorocytosine; griseofulvin; and haloprogin.

[0293] In certain embodiments, a microbial consortium can be administered with one or more anti-inflammatory and/or immunosuppressive agent selected from cyclophosphamide, mycophenolate mofetil, corticosteroids, mesalazine, mesalamine, sulfasalazine, sulfasalazine derivatives, cyclosporin A, mercaptopurine, azathiopurine, prednisone, methotrexate, antihistamines, glucocorticoids, epinephrine, theophylline, cromolyn sodium, anti-leukotrienes, anticholinergics, monoclonal anti-IgE, immunomodulatory peptides, immunomodulatory small molecules, immunomodulatory cytokines, immunomodulatory antibodies, and vaccines.

[0294] In certain embodiments, a Microbial Consortium disclosed herein (e.g., Microbial Consortium 1, Microbial Consortium 2, Microbial Consortium 3, Microbial Consortium 4, Microbial Consortium 5, Microbial Consortium 6, or Microbial Consortium 7) can be administered with one or more prebiotic selected from, but not limited to, amino acids, biotin, fructooligosaccharides, galactooligosaccharides, inulin, lactulose, mannan oligosaccharides, oligofructose-enriched inulin, oligofructose, oligodextrose, tagatose, trans-galacto-oligosaccharide, and xylooligosaccharides.

[0295] In certain embodiments, a Microbial Consortium disclosed herein (e.g., Consortia 1-7, each as set forth in Table 3) is administered in combination with an anti-inflammatory drug.

[0296] In certain embodiments, a Microbial Consortium disclosed herein (e.g., Consortia 1-7, each as set forth in Table 3) is administered in combination with an anti-diarrheal drug.

[0297] In certain embodiments, a Microbial Consortium disclosed herein (e.g., Consortia 1-7, each as set forth in Table 3) is administered in combination with a pain reliever. In certain embodiments, a Microbial Consortium disclosed herein (e.g., Consortia 1-7, each as set forth in Table 3) is administered in combination with a nonsteroidal anti-inflammatory drug (NSAIDs).

[0298] In certain embodiments, a Microbial Consortium disclosed herein (e.g., Consortia 1-7, each as set forth in Table 3) is administered in combination with vitamins and supplements.

[0299] In certain embodiments, a Microbial Consortium disclosed herein (e.g., Consortia 1-7, each as set forth in Table 3) is administered in combination with aminosalicylates.

[0300] In certain embodiments, a Microbial Consortium disclosed herein (e.g., Consortia 1-7, each as set forth in Table 3) is administered in combination with antibiotics.

[0301] In certain embodiments, a Microbial Consortium disclosed herein (e.g., Consortia 1-7, each as set forth in Table 3) is administered in combination with biologics. In certain embodiments, the biologics interrupt signals from the immune system that cause inflammation.

[0302] In certain embodiments, a Microbial Consortium disclosed herein (e.g., Consortia 1-7, each as set forth in Table 3) is administered in combination with corticosteroids or steroids.

[0303] In certain embodiments, a Microbial Consortium disclosed herein (e.g., Consortia 1-7, each as set forth in Table 3) is administered in combination with immunomodulators.

[0304] In certain embodiments, a Microbial Consortium disclosed herein (e.g., Consortia 1-7, each as set forth in Table 3) is administered in combination with any of the immune checkpoint inhibitors disclosed herein.

[0305] In certain embodiments, the combination treatment of a Microbial Consortium disclosed herein (e.g., Consortia 1-7, each as set forth in Table 3) comprises the pretreatment with antibiotics.

[0306] In certain embodiments, the pretreatment of antibiotics.

[0307] In certain embodiments, a bowel preparation (e.g., MiraLax) is administered in the late afternoon or early evening following the final dose of antibiotics.

### Pharmaceutical Compositions

[0308] The present disclosure also provides pharmaceutical compositions that contain an effective amount of a microbial consortium described herein. The composition can be formulated for use in a variety of delivery systems. One or more physiologically acceptable buffer(s) or carrier(s) can also be included in the composition for proper formulation. Suitable formulations for use in the present disclosure are found in Remington's Pharmaceutical Sciences, Mack Publishing Company, Philadelphia, Pa., 17th ed., 1985. For a brief review of methods for drug delivery, see, e.g., Langer (Science 249:1527-1533, 1990).

[0309] In certain embodiments, the presently disclosed pharmaceutical composition comprises Consortia 1-7, each as set forth in Table 3.

[0310] In certain embodiments, the presently disclosed pharmaceutical composition comprises microbial consortia 7 of Table 3. The relevance of the microbial consortia 7 of Table 3 with respect to therapeutic effect is such that the composition may include those microbial species of consortia 7 of Table 3 as the only microbial species in the composition. Consequently, the presently disclosed pharmaceutical composition comprises microbial consortia comprising or consisting of Ruminococcus FBI01839, Parabacteroides distasonis, Blautia caecimuris, Longibaculum muris, Blautia massiliensis, Alistipes putredinis, Akkermansia muciniphila, Faecalimonas umbilicata, Clostridium scindens, Bacteroides cellulosilyticus, Eggerthella lenta, Monoglobus pectinilyticus, Gordonibacter urolithinfaciens, Bacteroides ovatus, Bacteroides thetaiotaomicron, Bacteroides uniformis, Phocaeicola dorei, Thomasclavelia ramosa, Lactonifactor FBI02339, UBA1417 FBI02365, Alistipes onderdonkii, Veillonella atypica, Raoultibacter massiliensis, Flavonifractor plautii, Extibacter hylemonae, Odoribacter FBI02593, Bacteroides stercoris, Enterocloster clostridioformis, Hungatella hathewayii, Scatavimonas FBI02887, Ruminococcus gnavus, Enterocloster bolteae, Blautia FBI02891, Bacteroides finegoldii, Luoshenia tenuis, Bacteroides caccae, Phocaeicola vulgatus, Parabacteroides merdae, Lacticaseibacillus paracasei, Oliverpabstia intestinalis, Faecalibacterium prausnitzii, Bifidobacterium longum, Bifidobacterium bifidum, Lawsonibacter asaccharolyticus, Bifidobacterium dentium, and Veillonella atypica. Alternatively, the presently disclosed pharmaceutical composition comprises microbial consortia comprising or consisting of FBI01839, FBI01840, FBI01848, FBI01859, FBI01876, FBI01883, FBI01900, FBI01907, FBI01925, FBI01930, FBI01952, FBI01956, FBI01957, FBI02069, FBI02074, FBI02083, FBI02111, FBI02144, FBI02305, FBI02339, FBI02365, FBI02408, FBI02412, FBI02417, FBI02538, FBI02555, FBI02593, FBI02695, FBI02882, FBI02884, FBI02887, FBI02888, FBI02890, FBI02891, FBI02893, FBI02894, FBI02895, FBI02896, FBI02897, FBI02898, FBI02899, FBI02900, FBI02902, FBI02903, FBI02904, FBI02905, FBI02906, and FBI02908.

[0311] In certain embodiments, the presently disclosed pharmaceutical composition comprises an amount of at least about 1, at least about 10, at least about 10², at least about 10³, at least about 10⁴, at least about 10⁵, at least about 10⁶, at least about 10⁷, at least about 10⁸, at least about 10⁹, at least about 10¹⁰, at least about 10¹¹, at least about 10¹², or at least about 10¹³ microbes of each strain (e.g., each strain of Consortia 7 as set forth in Table 3). In certain embodiments, the presently disclosed pharmaceutical composition comprises between about 1 and about 10¹³ between about 10 and about 10¹³, between about 10² and about 10¹³, between about 10³ and about 10¹³, between about 10⁴ and about 10¹³, between about 10⁵ and about 10¹³, between about 10⁶ and about 10¹³, between about 10⁷ and about 10¹³, between about 10⁸ and about 10¹³, between about 10⁹ and about 10¹³, between about 10¹⁰ and about 10¹³, between about 10¹¹ and about 10¹³, between about 10¹² and about 10¹³, between about 10 and about 10¹², between about 10 and about 10¹¹, between about 10 and about 10¹⁰, between about 10 and about 10⁹, between about 10 and about 10⁸, between about 10 and about 10⁷, between about 10 and about 10⁶, between about 10 and about 10⁵, between about 10 and about 10⁴, between about 10 and about 10³, between about 10² and about 10¹², between about 10² and about 10¹¹, between about 10² and about 10¹⁰, between about 10² and about 10⁹, between about 10² and about 10⁸, between about 10² and about 10⁷, between about 10² and about 10⁶, between about 10² and about 10⁵, between about 10² and about 10⁴, between about 10² and about 10³, between about 10² and about 10⁹, between about 10³ and about 10⁹, between about 10⁴ and about 10⁹, between about 10⁵ and about 10⁹, between about 10⁶ and about 10⁹, between about 10⁷ and about 10⁹, between about 10⁸ and about 10⁹, between about 10² and about 10⁶, between about 10³ and about 10⁶, between about 10⁴ and about 10⁶, or between about 10⁵ and about 10⁶ microbes for each strain (e.g., each strain of Consortia 7 as set forth in Table 3). In certain embodiments, each strain can be present in different amounts. For example, but without any limitation, a pharmaceutical composition comprising a first strain, a second strain, and a third strain can comprise 10 microbes of the first strain, 10⁷ microbes of the second strain, 10³ microbes of the third strain.

[0312] In certain embodiments, the presently disclosed pharmaceutical composition comprises an amount of at least about 10, at least about 10², at least about 10³, at least about 10⁴, at least about 10⁵, at least about 10⁶, at least about 10⁷, at least about 10⁸, at least about 10⁹, at least about 10¹⁰, at least about 10¹¹, at least about 10¹², or at least about 10¹³ CFUs of each strain (e.g., each strain of Consortia 7 as set forth in Table 3). In certain embodiments, the presently disclosed pharmaceutical composition comprises between about 1 and about 10¹³, about 10 and about 10¹³, between about 10² and about 10¹³, between about 10³ and about 10¹³, between about 10⁴ and about 10¹³, between about 10⁵ and about 10¹³, between about 10⁶ and about 10¹³, between about 10⁷ and about 10¹³, between about 10⁸ and about 10¹³, between about 10⁹ and about 10¹³, between about 10¹⁰ and about 10¹³, between about 10¹¹ and about 10¹³, between about 10¹² and about 10¹³, between about 10² and about 10¹², between about 10² and about 10¹¹, between about 10² and about 10¹⁰, between about 10² and about 10⁹, between about 10² and about 10⁸, between about 10² and about 10⁷, between about 10² and about 10⁶, between about 10² and about 10⁵, between about 10² and about 10⁴, between about 10² and about 10³, between about 10² and about 10⁹, between about 10³ and about 10⁹, between about 10⁴ and about 10⁹, between about 10⁵ and about 10⁹, between about 10⁶ and about 10⁹, between about 10⁷ and about 10⁹, between about 10⁸ and about 10⁹, between about 10² and about 10⁶, between about 10³ and about 10⁶, between about 10⁴ and about 10⁶, or between about 10⁵ and about 10⁶ CFUs for each strain (e.g., each strain of Consortia 7 as set forth in Table 3). In certain embodiments, each strain can be present in different amounts. For example, but without any limitation, a pharmaceutical composition comprising a first strain, a second strain, and a third strain can comprise 10 CFUs of the first strain, 10⁷ CFUs of the second strain, 10³ CFUs of the third strain.

[0313] In certain embodiments, the presently disclosed pharmaceutical composition comprises an amount of at least about 101, at least about 10⁻², at least about 10⁻³, at least about 10⁻⁴, at least about 10⁻⁵, at least about 10⁻⁶, at least about 10⁻⁷, at least about 10⁻⁸, at least about 10⁻⁹, at least about 10⁻¹⁰, at least about 10⁻¹¹, or at least about 10⁻¹², or at least about 10¹³ grams of each strain (e.g., each strain of Consortia 7 as set forth in Table 3). In certain embodiments, each strain can be present in different amounts. For example, but without any limitation, a pharmaceutical composition comprising a first strain, a second strain, and a third strain can comprise 10⁻⁴ grams of the first strain, 10⁻³ grams of the second strain, 10⁻⁶ grams of the third strain.

[0314] In certain embodiments, the presently disclosed pharmaceutical composition comprises a total amount of at least about 1, at least about 10, at least about 10², at least about 10³, at least about 10⁴, at least about 10⁵, at least about 10⁶, at least about 10⁷, at least about 10⁸, at least about 10⁹, at least about 10¹⁰, at least about 10¹¹, at least about 10¹², or at least about 10¹³ microbes (e.g., total amount of microbes of Consortia 7 as set forth in Table 3). In certain embodiments, the presently disclosed pharmaceutical composition comprises a total amount of between about 10 and about 10¹³, between about 10² and about 10¹³, between about 10³ and about 10¹³, between about 10⁴ and about 10¹³, between about 10⁵ and about 10¹³, between about 10⁶ and about 10¹³, between about 10⁷ and about 10¹³, between about 10⁸ and about 10¹³, between about 10⁹ and about 10¹³, between about 10¹⁰ and about 10¹³, between about 10¹¹ and about 10¹³, between about 10¹² and about 10¹³, between about 10² and about 10¹², between about 10² and about 10¹¹, between about 10² and about 10¹⁰, between about 10² and about 10⁹, between about 10² and about 10⁸, between about 10² and about 10⁷, between about 10² and about 10⁶, between about 10² and about 10⁵, between about 10² and about 10⁴, between about 10² and about 10³, between about 10² and about 10⁹, between about 10³ and about 10⁹, between about 10⁴ and about 10⁹, between about 10⁵ and about 10⁹, between about 10⁶ and about 10⁹, between about 10⁷ and about 10⁹, between about 10⁸ and about 10⁹, between about 10² and about 10⁶, between about 10³ and about 10⁶, between about 10⁴ and about 10⁶, or between about 10⁵ and about 10⁶ microbes.

[0315] In certain embodiments, the presently disclosed pharmaceutical composition comprises a total amount of at least about 1, at least about 10, at least about 10², at least about 10³, at least about 10⁴, at least about 10⁵, at least about 10⁶, at least about 10⁷, at least about 10⁸, at least about 10⁹, at least about 10¹⁰, at least about 10¹¹, at least about 10¹², or at least about 10¹³ CFUs (e.g., total CFUs of Consortia 7 as set forth in Table 3). In certain embodiments, the presently disclosed pharmaceutical composition comprises a total amount of between about 10 and about 10¹³, between about 10² and about 10¹³, between about 10³ and about 10¹³, between about 10⁴ and about 10¹³, between about 10⁵ and about 10¹³, between about 10⁶ and about 10¹³, between about 10⁷ and about 10¹³, between about 10⁸ and about 10¹³, between about 10⁹ and about 10¹³, between about 10¹⁰ and about 10¹³, between about 10¹¹ and about 10¹³, between about 10¹² and about 10¹³, between about 10² and about 10¹², between about 10² and about 10¹¹, between about 10² and about 10¹⁰, between about 10² and about 10⁹, between about 10² and about 10⁸, between about 10² and about 10⁷, between about 10² and about 10⁶, between about 10² and about 10⁵, between about 10² and about 10⁴, between about 10² and about 10³, between about 10² and about 10⁹, between about 10³ and about 10⁹, between about 10⁴ and about 10⁹, between about 10⁵ and about 10⁹, between about 10⁶ and about 10⁹, between about 10⁷ and about 10⁹, between about 10⁸ and about 10⁹, between about 10² and about 10⁶, between about 10³ and about 10⁶, between about 10⁴ and about 10⁶, or between about 10⁵ and about 10⁶ CFUs. In certain embodiments, the presently disclosed pharmaceutical composition comprises between about 10⁵ and about 10¹³, between about 10⁶ and about 10¹³, between about 107 and about 10¹³, between about 10⁸ and about 10¹³, between about 10⁹ and about 10¹³, between about 10¹⁰ and about 10¹³, between about 10¹¹ and about 10¹³, between about 10¹² and about 10¹³, between about 10⁵ and about 10¹², between about 10⁶ and about 10¹², between about 10⁷ and about 10¹², between about 10⁸ and about 10¹², between about 10⁹ and about 10¹², between about 10¹⁰ and about 10¹², between about 10¹¹ and about 10¹², between about 10⁵ and about 10¹¹, between about 10⁶ and about 10¹¹, between about 10⁷ and about 10¹¹, between about 10⁸ and about 10¹¹, between about 10⁹ and about 10¹¹, between about 10¹⁰ and about 10¹¹, between about 10⁵ and about 10¹⁰, between about 10⁶ and about 10¹⁰, between about 10⁷ and about 10¹⁰, between about 10⁸ and about 10¹⁰, between about 10⁹ and about 10¹⁰, between about 10⁵ and about 10⁹, between about 10⁶ and about 10⁹, between about 10⁷ and about 10⁹, between about 10⁸ and about 10⁹, between about 5×10⁹ and about 5×10¹⁰, between about 5×10⁹ and about 5×10¹¹, between about 5×10⁹ and about 5×10¹², between about 5×10¹⁰ and about 5×10¹², between about 5×10¹¹ and about 5×10¹², or between about 5×10¹⁰ and about 5×10¹¹ viable cells. In certain embodiments, the presently disclosed pharmaceutical composition comprises between about 5×10⁹ and about 5×10¹² viable cells. In certain embodiments, the presently disclosed pharmaceutical composition comprises between about 5×10⁹ and about 5×10¹⁰ viable cells. In certain embodiments, the presently disclosed pharmaceutical composition comprises between about 5×10¹⁰ and about 5×10¹¹ viable cells. In certain embodiments, the presently disclosed pharmaceutical composition comprises between about 5×10¹¹ and about 5×10¹² viable cells.

[0316] In certain embodiments, the presently disclosed pharmaceutical composition comprises up to about 10⁵, up to about 10⁶, up to about 10⁷, up to about 10⁸, up to about 10⁹, up to about 10¹⁰, up to about 10¹¹, up to about 10¹², or up to about 10¹³ viable cells. In certain embodiments, the presently disclosed pharmaceutical composition comprises up to about 10¹¹ viable cells. In certain embodiments, the presently disclosed pharmaceutical composition comprises up to about 10¹² viable cells.

[0317] In certain embodiments, the presently disclosed pharmaceutical composition can be present in the form of a food product comprising a consortium disclosed herein (e.g., Consortia 7 as set forth in Table 3). As used herein, the term “food product” refers to a composition intended for ingestion by an individual (e.g., a human subject). Non-limiting examples of food products encompassed by the present disclosure include juices, refreshing beverages, tea beverages, drink preparations, jelly beverages, functional beverages, milk, dairy beverages, ice creams, cheeses, yogurts, biscuits, cookies, candies, chewing gums, gummies, jellies, cream caramels, frozen desserts, and instant foods. Further, the examples also include health foods and beverages prepared in the forms of powders, granules, tablets, capsules, liquids, pastes, and jellies. In certain embodiments, the food product comprising a presently disclosed consortia further comprises a prebiotic. As used herein, the term “prebiotic” refers to a substance that can promote the growth of the microbes of the consortia. Non-limiting examples of prebiotic include fructose, galactose, mannose, soy, inulin, dietary fibers, or a combination thereof.

[0318] In certain embodiments, microbial cells of the present disclosure are harvested by microfiltration and centrifugation. In certain embodiments, microfiltration is done with a membrane comprising a nonreactive polymer. For example, in certain non-limiting embodiments, said membrane comprises Polyvinylidene fluoride, Polysulfones, or nitrocellulose. In certain embodiments, a membrane for microfiltration has a pore size from about 0.2 μm to about 0.45 μm. In certain embodiments, the cells are centrifuged at from about 1000 g to about 30000 g, from about 5000 g to about 30000 g, from about 10000 g to about 30000 g, from about 15000 g to about 30000 g, from about 20000 g to about 30000 g, from about 25000 g to about 30000 g, from about 1000 g to about 25000 g, from about 5000 g to about 25000 g, from about 10000 g to about 25000 g, from about 15000 g to about 25000 g, from about 20000 g to about 25000 g, from about 1000 g to about 20000 g, from about 5000 g to about 20000 g, from about 10000 g to about 20000 g, from about 15000 g to about 20000 g, from about 1000 g to about 15000 g, from about 5000 g to about 15000 g, from about 10000 g to about 15000 g, from about 1000 g to about 10000 g, from about 5000 g to about 10000 g, or from about 1000 g to about 5000 g force.

[0319] In certain embodiments, the cells are concentrated to from about 1×10⁶ CFUs per milliliter to about 1×10¹² CFUs per milliliter, from about 1×10⁷ CFUs per milliliter to about 1×10¹² CFUs per milliliter, from about 1×10⁸ CFUs per milliliter to about 1×10¹² CFUs per milliliter, from about 1×10⁹ CFUs per milliliter to about 1×10¹² CFUs per milliliter, from about 1×10¹⁰ CFUs per milliliter to about 1×10¹² CFUs per milliliter, from about 1×10¹¹ CFUs per milliliter to about 1×10¹² CFUs per milliliter, from about 1×10⁶ CFUs per milliliter to about 1×10¹¹ CFUs per milliliter, from about 1×10⁷ CFUs per milliliter to about 1×10¹¹ CFUs per milliliter, from about 1×10⁸ CFUs per milliliter to about 1×10¹¹ CFUs per milliliter, from about 1×10⁹ CFUs per milliliter to about 1×10¹¹ CFUs per milliliter, from about 1×10¹⁰ CFUs per milliliter to about 1×10¹¹ CFUs per milliliter, from about 1×10⁶ CFUs per milliliter to about 1×10¹⁰ CFUs per milliliter, from about 1×10⁷ CFUs per milliliter to about 1×10¹⁰ CFUs per milliliter, from about 1×10⁸ CFUs per milliliter to about 1×10¹⁰ CFUs per milliliter, from about 1×10⁹ CFUs per milliliter to about 1×10¹⁰ CFUs per milliliter, from about 1×10⁶ CFUs per milliliter to about 1×10⁹ CFUs per milliliter, from about 1×10⁷ CFUs per milliliter to about 1×10⁹ CFUs per milliliter, from about 1×10⁸ CFUs per milliliter to about 1×10⁹ CFUs per milliliter, from about 1×10⁶ CFUs per milliliter to about 1×10⁸ CFUs per milliliter, from about 1×10⁷ CFUs per milliliter to about 1×10⁸ CFUs per milliliter, or from about 1×10⁶ CFUs per milliliter to about 1×10⁷ CFUs per milliliter.

[0320] In certain embodiments, microbial cells of the present disclosure are frozen. In certain embodiments, the microbial cells of the present disclosure are mixed with one or more cryoprotective agents (CPAs) before freezing. In certain embodiments, the ratio of cells to CPA is approximately 25:1, 10:1, 5:1, 4:1, 3:1, 2:1, 1:1, 1:2, 1:3, 1:4, 1:5, 1:10, or 1:25. In certain embodiments, a CPA comprises one or more of glycerol, maltodextrin, sucrose, inulin, trehalose, and alginate. In certain embodiments, a CPA further comprises one or more antioxidants. In certain embodiments, an antioxidant is selected from the list of cysteine, ascorbic acid, and riboflavin.

### Dosages

[0321] Dosing and schedule can include a larger loading dose at 1e10, 1e11, 1e12, or up to 1e13 cells. Dosing can be one-time or include maintenance dosing. Maintenance dose can be 1e9, 1e10, or 1e11 cells, dosed multiple times per day, daily, weekly, monthly, or quarterly.

[0322] In certain embodiments, a microbial consortium is administered in a dosage form having a total amount of microbial consortium of 0.1 ng to 500 mg, 0.5 ng to 500 mg, 1 ng to 500 mg, 5 ng to 500 mg, 10 ng to 500 mg, 50 ng to 500 mg, 100 ng to 500 mg, 500 ng to 500 mg, 1 μg to 500 mg, 5 μg to 500 mg, 10 μg to 500 mg, 50 μg to 500 mg, 100 μg to 500 mg, 500 μg to 500 mg, 1 mg to 500 mg, 5 mg to 500 mg, 10 mg to 500 mg, 50 mg to 500 mg, 100 mg to 500 mg, 0.1 ng to 100 mg, 0.5 ng to 100 mg, 1 ng to 100 mg, 5 ng to 100 mg, 10 ng to 100 mg, 50 ng to 100 mg, 100 ng to 100 mg, 500 ng to 500 mg, 1 μg to 100 mg, 5 μg to 100 mg, 10 μg to 100 mg, 50 μg to 100 mg, 100 μg to 100 mg, 500 μg to 100 mg, 1 mg to 500 mg, 5 mg to 100 mg, 10 mg to 100 mg, 50 mg to 100 mg, 0.1 ng to 50 mg, 0.5 ng to 50 mg, 1 ng to 50 mg, 5 ng to 50 mg, 10 ng to 50 mg, 50 ng to 50 mg, 100 ng to 50 mg, 500 ng to 500 mg, 1 μg to 50 mg, 5 μg to 50 mg, 10 μg to 50 mg, 50 μg to 50 mg, 100 μg to 50 mg, 500 μg to 50 mg, 1 mg to 500 mg, 5 mg to 50 mg, 10 mg to 50 mg, 0.1 ng to 10 mg, 0.5 ng to 10 mg, 1 ng to 10 mg, 5 ng to 10 mg, 10 ng to 10 mg, 50 ng to 10 mg, 100 ng to 10 mg, 500 ng to 500 mg, 1 μg to 10 mg, 5 μg to 10 mg, 10 μg to 10 mg, 50 μg to 10 mg, 100 μg to 10 mg, 500 μg to 10 mg, 1 mg to 500 mg, 5 mg to 10 mg, 0.1 ng to 5 mg, 0.5 ng to 5 mg, 1 ng to 5 mg, 5 ng to 5 mg, 10 ng to 5 mg, 50 ng to 5 mg, 100 ng to 5 mg, 500 ng to 500 mg, 1 μg to 5 mg, 5 μg to 5 mg, 10 μg to 5 mg, 50 μg to 5 mg, 100 μg to 5 mg, 500 μg to 5 mg, 1 mg to 500 mg, 0.1 ng to 1 mg, 0.5 ng to 1 mg, 1 ng to 1 mg, 5 ng to 1 mg, 10 ng to 1 mg, 50 ng to 1 mg, 100 ng to 1 mg, 500 ng to 500 mg, 1 μg to 1 mg, 5 μg to 1 mg, 10 μg to 1 mg, 50 μg to 1 mg, 100 μg to 1 mg, 500 μg to 1 mg, 0.1 ng to 500 μg, 0.5 ng to 500 μg, 1 ng to 500 μg, 5 ng to 500 μg, 10 ng to 500 μg, 50 ng to 500 μg, 100 ng to 500 μg, 500 ng to 500 μg, 1 μg to 500 μg, 5 μg to 500 μg, 10 μg to 500 μg, 50 μg to 500 μg, 100 μg to 500 μg, 0.1 ng to 100 μg, 0.5 ng to 100 μg, 1 ng to 100 μg, 5 ng to 100 μg, 10 ng to 100 μg, 50 ng to 100 μg, 100 ng to 100 μg, 500 ng to 100 μg, 1 μg to 100 μg, 5 μg to 100 μg, 10 μg to 100 μg, 50 μg to 100 μg, 0.1 ng to 50 μg, 0.5 ng to 50 μg, 1 ng to 50 lag, 5 ng to 50 μg, 10 ng to 50 μg, 50 ng to 50 μg, 100 ng to 50 μg, 500 ng to 50 g, 1 μg to 50 g, 5 μg to 50 g, 10 μg to 50 g, 0.1 ng to 10 μg, 0.5 ng to 10 μg, 1 ng to 10 μg, 5 ng to 10 μg, 10 ng to 10 μg, 50 ng to 10 μg, 100 ng to 10 μg, 500 ng to 10 μg, 1 μg to 10 μg, 5 μg to 10 μg, 0.1 ng to 5 μg, 0.5 ng to 5p g, 1 ng to 5p g, 5 ng to 5 μg, 10 ng to 5 μg, 50 ng to 5 μg, 100 ng to 5 μg, 500 ng to 5 μg, 1 μg to 5 μg, 0.1 ng to 1 μg, 0.5 ng to 1 μg, 1 ng to 1 μg, 5 ng to 1 μg, 10 ng to 1 μg, 50 ng to 1 μg, 100 ng to 1 μg, 500 ng to 1 μg, 0.1 ng to 500 ng, 0.5 ng to 500 ng, 1 ng to 500 ng, 5 ng to 500 ng, 10 ng to 500 ng, 50 ng to 500 ng, 100 ng to 500 ng, 0.1 ng to 100 ng, 0.5 ng to 100 ng, 1 ng to 100 ng, 5 ng to 100 ng, 10 ng to 100 ng, 50 ng to 100 ng, 0.1 ng to 50 ng, 0.5 ng to 50 ng, 1 ng to 50 ng, 5 ng to 50 ng, 10 ng to 50 ng, 0.1 ng to 10 ng, 0.5 ng to 10 ng, 1 ng to 10 ng, 5 ng to 10 ng, 0.1 ng to 5 ng, 0.5 ng to 5 ng, 1 ng to 5 ng, 0.1 ng to 1 ng, 0.1 ng to 1 ng, or 0.1 ng to 0.5 ng total dry weight.

[0323] In certain embodiments, a microbial consortium is administered as a single dose or as multiple doses. In certain embodiments, a microbial consortium is administered intermittently. For example, in certain non-limiting embodiments, a microbial consortium is administered once weekly, once monthly, or when a subject is in need thereof. In certain embodiments, the consortium is administered once a day for 2 days, 3 days, 4 days, 5 days, 6 days, or 1 week. In certain embodiments, the consortium is administered once a week for 2 weeks, 3 weeks, or 1 month. In some embodiments, the consortium is administered once a month for 2 months, 3 months, 4 months, 5 months, 6 months, or 1, 2, 3, or more years.

[0324] In certain embodiments, the consortium is administered at an effective dose to allow for engraftment.

### Formulation: Drug Substance Formulation

[0325] After co-culture fermentation, the microbial biomass can be harvested, concentrated, and formulated, e.g., with glycerol (10-25%) before being stored frozen at ≤−65° C. Lyophilization can also be employed.

### Formulation: Drug Product Formulation

[0326] For drug product formulation, a drug substance can be thawed and blended before manual filling into capsules (DP1) or freezer-stable bags (DP2) or lyophilized and put into capsules (DP3). The filled capsules and bags will be stored at ≤−65° C. within a container-closure system. Further detail is provided below and in FIG. 1.
[0327] DP1 for oral route: The blended drug substance material can be filled into gelatin or capsules.
[0328] DP2 for colonoscopy route: The blended drug substance material can be filled into freezer-stable bags.

[0329] Colonoscopic delivery of frozen material has demonstrated success clinically. Treatment can involve this route, with optional oral maintenance. Oral delivery is also a possibility.

[0330] If engraftment is not successful, future efforts could involve oral delivery and possible antibiotic pre-treatment.

### Methods of Preparation, Isolation, and Culture

[0331] The present disclosure also provides methods for preparing and/or manufacturing the microbial consortia described herein.

[0332] In certain embodiments, the methods comprise obtaining a donor stool and preparing a stool dilution. In certain embodiments, the stool dilution is plated onto an agar plate. In certain embodiments, the agar plate includes an anaerobic media. In certain embodiments, the agar plate includes colonies. Characterization and quality analysis of these colonies can be performed. For example, but without any limitation, 16s RNA and/or MALDI mass spectrometry could be performed. In certain embodiments, the characterized colonies can be further expanded in a broth culture. After growth and expansion, the microbes can be stored in vials for further use.

[0333] In certain embodiments, the microbes can be further expanded in a bioreactor including a cell culture medium. In certain embodiments, the cell culture medium can include:
[0334] a) soytone, D-cellobiose, yeast extract, dextrose (glucose), maltose monohydrate, magnesium sulfate heptahydrate, calcium chloride dihydrate, potassium phosphate monobasic, potassium phosphate dibasic, sodium chloride, sodium bicarbonate, volatile fatty acid solution, L-cysteine HCl monohydrate, hemin solution, vitamin solution, or a combination thereof, or
[0335] b) soytone, D-cellobiose, yeast extract, dextrose (glucose), maltose monohydrate, magnesium sulfate heptahydrate, calcium chloride dihydrate, potassium phosphate monobasic, potassium phosphate dibasic, sodium chloride, ammonium sulfate, sodium bicarbonate, volatile fatty acid solution, L-cysteine HCl monohydrate, hemin solution, vitamin solution, or a combination thereof.

[0336] In certain embodiments, the cell culture medium is YCFAC. In certain embodiments, the cell culture medium further comprises threonine. In certain embodiments, the cell culture media is YSFAC.

[0337] In certain embodiments, the microbes can be expanded in a bioreactor in anaerobic conditions. In certain embodiments, the microbes can be expanded in a bioreactor in the presence of gas overlay. In certain embodiments, the microbes can be expanded in a bioreactor in absence of gas sparing.

[0338] In certain embodiments, the methods include expanding microbes in mixed cultures.

[0339] In certain embodiments, the methods comprise lyophilizing cultures and compositions described herein. In certain embodiments, the cultures and compositions comprise a lyoprotectant.

[0340] In certain embodiments, the lyoprotectant comprises maltodextrin. In certain embodiments, the lyoprotectant comprises inulin. In certain embodiments, the lyoprotectant comprises maltodextrin and inulin. In certain embodiments, the maltodextrin is present at a concentration of about 8%. In certain embodiments, the inulin is present at a concentration of about 0.5%.

[0341] In certain embodiments, the presently disclosed microbial consortia are prepared using the methods described in the Example section.

[0342] Methods for bacterial isolation and culture of the microbial consortia of the present disclosure are provided in the Examples. Additionally, further methods for isolation are described, for example, in U.S. Provisional Patent Application No. 63/716,534, filed Nov. 5, 2024, which is incorporated by reference in its entirety. Additional culture methods are disclosed, for example, in patent application publications WO2021/183701 and US2023/0165913, each of which is incorporated by reference in its entirety.

### Kits

[0343] The presently disclosed subject matter provides kits for treating or preventing a cancer in a subject in need thereof. In certain embodiments, the subject has received or will receive an immunotherapy including an immune checkpoint inhibitor (ICI). In certain embodiments, the kit comprises an effective amount of a presently disclosed microbial consortium or a pharmaceutical composition comprising thereof.

[0344] In certain embodiments, the kit comprises a sterile container; such containers can be boxes, ampules, bottles, vials, tubes, bags, pouches, blister-packs, or other suitable container forms known in the art. Such containers can be made of plastic, glass, laminated paper, metal foil, or other materials suitable for holding medicaments. In certain non-limiting embodiments, the kit includes anaerobic containers to hold the microbial consortium described herein. In certain non-limiting embodiments, the kit includes blister packs to hold the microbial consortium described herein in the presence of no or limited amounts of oxygen. In certain non-limiting embodiments, the kit includes blister packs with desiccant to hold the microbial consortium described herein in the presence of no or limited amounts of oxygen. In certain non-limiting embodiments, the kit includes bottles with desiccant to hold the microbial consortium described herein in the presence of no or limited amounts of oxygen.

[0345] In certain embodiments, the kits include instructions for administering the microbial consortium as described herein. In certain embodiments, the instructions include directions for administering the loading and the maintenance dose.

[0346] In certain embodiments, the kits include storage instructions. In certain embodiments, the storage instructions are for storage at approximately −20° C. In certain embodiments, the storage instructions are for storage at less than −5° C. In certain embodiments, the storage instructions are for storage at less than approximately −15 to −20° C., −10 to −20° C., −10 to −15° C., −5 to −10° C., 0 to −5° C., below 0° C., or 0 to −20° C. In certain embodiments, the storage instructions are for storage at less than approximately 4° C. In certain embodiments, the storage instructions are for storage at room temperature.

[0347] In certain embodiments, the kits include instructions for maintaining the microbial consortium in no or low oxygen conditions.

[0348] In certain embodiments, the kits include instructions for the subject to remain off all antibiotics during treatment with the microbial consortium.

[0349] In certain embodiments, the kit includes microbial consortium and instructions for administering the same.

### EXAMPLES

[0350] The disclosure now being generally described, will be more readily understood by reference to the following examples which are included merely for purposes of illustration of certain aspects and embodiments of the present disclosure and are not intended to limit the scope of the disclosure in any way.

### Example 1: Super Donor Fecal Material Source

[0351] Fecal material was collected from a super donor who is a cancer survivor with a complete response to checkpoint immunotherapy (pembrolizumab). The super donor has been in remission since July 2022. FMT from the super donor demonstrated the ability to induce a therapeutic response to immunotherapy in previously non-responsive cancer patients. Fecal material was collected from the same super donor at multiple time points.

### Example 2: Species Isolation

[0352] The isolation of species from the super donor fecal material was conducted using a conventional method, matrix-assisted laser desorption ionization (MALDI) based liquid culture isolation, and with targeted liquid culture isolation. The material was quickly processed and stored under anaerobic conditions to preserve anaerobic species viability. The material was collected from three timepoints in order to compile a complete collection of species since individual species abundance may wax and wane over time.

[0353] The list of isolates from the super donor fecal material is provided in Tables 1 and 3. Also included are the sequence identifiers for the genomic sequences of the species.

### Example 3: Species Isolation, Stability, Growth Curves and Genomic Characterization

[0354] Further information on the particular methods of isolation and details on super donor source for each species are provided in Table 2. Details on methodology are provided in Example 8. For Isolation Method in Table 2, a designation of 1 is for the conventional method, 2 is for the MALDI-based liquid culture isolation, and 3 is for the targeted liquid culture isolation method.

TABLE 2
Isolation, Super Donor Source Donation Date and Isolation Medium

| | | SD Source | |
|---|---|---|---|
| Bacteria | Isolation | Donation | |
| ID | Method | Time Point | Isolation Medium (Agar) |
| FBI01839 | 1 | A | Anaerobe Systems BHI |
| FBI01840 | 1 | A | Anaerobe Systems BHI |
| FBI01848 | 1 | A | Anaerobe Systems BHI |
| FBI01859 | 1 | A | Anaerobe Systems BHI |
| FBI01861 | 1 | A | Anaerobe Systems BHI |
| FBI01863 | 1 | A | Anaerobe Systems BHI |
| FBI01866 | 1 | A | Anaerobe Systems BHI |
| FBI01876 | 1 | A | Anaerobe Systems BHI |
| FBI01883 | 1 | A | Anaerobe Systems BHI |
| FBI01900 | 1 | A | Anaerobe Systems BHI |
| FBI01907 | 1 | A | Anaerobe Systems BHI |
| FBI01925 | 1 | A | Anaerobe Systems BHI |
| FBI01930 | 1 | A | Anaerobe Systems BHI |
| FBI01952 | 1 | A | Anaerobe Systems BHI |
| FBI01956 | 1 | A | Anaerobe Systems BHI |
| FBI01957 | 1 | A | Anaerobe Systems BHI |
| FBI02069 | 1 | A | Anaerobe Systems BHI |
| FBI02074 | 1 | A | Anaerobe Systems BHI |
| FBI02083 | 1 | A | Anaerobe Systems BHI |
| FBI02101 | 1 | A | Anaerobe Systems MRS |
| FBI02106 | 1 | A | Anaerobe Systems LMRS |
| FBI02111 | 1 | A | Anaerobe Systems LMRS |
| FBI02144 | 1 | A | Anaerobe Systems LMRS |
| FBI02158 | 1 | A | Anaerobe Systems RCA |
| FBI02176 | 1 | A | Anaerobe Systems RCA |
| FBI02208 | 1 | A | Anaerobe Systems RCA |
| FBI02271 | 1 | A | Anaerobe Systems CDC |
| FBI02288 | 1 | A | Anaerobe Systems CDC |
| FBI02305 | 1 | A | Anaerobe Systems CDC |
| FBI02325 | 1 | A | Anaerobe Systems CDC |
| FBI02339 | 1 | A | Anaerobe Systems CDC |
| FBI02365 | 1 | A | Anaerobe Systems CDC |
| FBI02408 | 1 | A | Anaerobe Systems CDC |
| FBI02412 | 1 | A | Anaerobe Systems CDC |
| FBI02417 | 1 | A | Anaerobe Systems CDC |
| FBI02538 | 1 | A | BHI-mucin |
| FBI02555 | 1 | A | BHI-mucin |
| FBI02593 | 1 | A | BHI-mucin |
| FBI02695 | 1 | A | BHI-mucin |
| FBI02882 | 2 | B | Anaerobe Systems YCFAC |
| FBI02884 | 2 | B | Anaerobe Systems YCFAC |
| FBI02887 | 2 | B | Anaerobe Systems YCFAC |
| FBI02888 | 2 | B | Anaerobe Systems YCFAC |
| FBI02890 | 2 | A | Anaerobe Systems YCFAC |
| FBI02891 | 2 | A | Anaerobe Systems YCFAC |
| FBI02893 | 2 | B | Anaerobe Systems YCFAC |
| FBI02894 | 2 | B | Anaerobe Systems YCFAC |
| FBI02895 | 2 | A | Anaerobe Systems YCFAC |
| FBI02896 | 2 | A | Anaerobe Systems YCFAC |
| FBI02897 | 2 | A | Anaerobe Systems YCFAC |
| FBI02898 | 2 | A | Teknova BHI |
| FBI02899 | 2 | C | Anaerobe Systems YCFAC + |
| | | | Hemin/Vitamin K |
| FBI02900 | 2 | C | Anaerobe Systems YCFAC + |
| | | | Hemin/Vitamin K |
| FBI02901 | 2 | C | Anaerobe Systems YCFAC + |
| | | | Hemin/Vitamin K |
| FBI02902 | 2 | C | Anaerobe Systems YCFAC + |
| | | | Hemin/Vitamin K |
| FBI02903 | 2 | C | Anaerobe Systems YCFAC + |
| | | | Hemin/Vitamin K |
| FBI02904 | 3 | C | Anaerobe Systems YCFAC + |
| | | | Hemin/Vitamin K |
| FBI02905 | 3 | C | Anaerobe Systems YCFAC + |
| | | | Hemin/Vitamin K |
| FBI02906 | 3 | C | Anaerobe Systems YCFAC (50%) + |
| | | | Biochemazone Artificial Intestinal |
| | | | Fluid (50%) |
| FBI02908 | 2 | B | Anaerobe Systems YCFAC + 0.01% |
| | | | Tween |

[0355] Bacteria stability was assessed for each bacterial species after being frozen at −80° C. for ≥30 days using a colony forming unit (CFU) measurement. The species failed the stability assessment if there was a loss of more than 90% of viable cells (by CFU) after being thawed at the evaluation timepoint. All species passed the stability test except for Blautia wexlerae FBI01866 and Agathobacter rectalis FBI02901.

[0356] Growth curve data for each individual species was generated, measured using a dilution curve.

[0357] Data on growth curves are shown in FIGS. 2A-2F, 3A-3F, 4A-4F, 5A-5F, 5A-6F, 7A-7F, 8A-8F, 9A-9F, 10A-10F, and 11A-11F. When selecting bacterial species for microbial consortia, it may be beneficial for them to demonstrate similar growth properties as detailed here; however, the disclosed growth curves are not necessary to make each of the consortia described herein.

[0358] Screening for virulence factors and identification of non-typical gut commensals or potential opportunistic pathobionts identified led to exclusion of some species from some versions of the microbial consortia. Streptococcus and Enterococcus species were excluded from some microbial consortia versions.

[0359] Identification of species/strain specific signatures enabled detection in clinical sample.

### Example 4: Microbial Consortia Bacteria

[0360] Seven microbial consortia (Consortia 1, 2, 3, 4, 5, 6, and 7, each as set forth in Table 3) were generated as different subsets of the bacteria identified in the super donor fecal material. Versions 5.1, 6.1, and 6.2 were also designed in the process of consortia selection and optimization. The super donor species are listed as “Species” in Table 3 (and also in Table 1). Table 3 below also details the species makeup of each of the six microbial consortia. “Yes” denotes that the bacteria is present in that microbial consortium and a blacked-out box denotes that the bacteria was excluded from an individual consortium.

### Example 5: Microbial Consortia and Tumor Volume

[0361] The ability of the bacterial of the microbial consortia to induce control over tumor volume was assessed in various models.

[0362] In one study, super donor FMT induced better tumor control with ICI treatment in a melanoma germ-free BP melanoma mouse model as compared to FMT from an ICI non-responder and a benchmark responder. Results are shown in FIG. 12. The super donor's microbiome, administered as a fecal suspension was able to better inhibit tumor growth in combination with ICI treatment compared with either an ICI non-responder or a benchmark responder.

[0363] Eight week old female C57BL/6J germ-free mice received a slurry containing 20 mg FMT in a phosphate-buffered saline solution (PBS) with 1000 glycerol (w/v). Mice were orally gavaged QD with 200 μL of the slurry for 3 days every other day. 800,000 BP melanoma cells were injected subcutaneously in the right flank of each mouse 7 days post-FMT. Once tumors reached an average size of 250 mm3, typically day 10-12 after tumor injection, mice were then dosed with 3 doses of 200 g αPD-L1 antibody, administered intraperitoneally every other day. A final tumor measurement was performed at the end of study, 4 days following the last dose of αPD-L1 antibody.

[0364] In another study, Consortia 1 and 2, each as set forth in Table 3, treatments were compared to super donor FMT using the same BP melanoma mouse model and ICI treatment as above. Consortia 1, Consortia 2, and super donor fecal material were administered as a suspension (20 mg in 200 μl in PBS with 10% glycerol (w/v)), and tumor growth was compared with mice treated with FMT from an ICI non-responder. The data are shown in FIG. 13 and demonstrate the ability of the microbial consortia treatment to inhibit tumor growth in combination with ICI in similar fashion to the super donor treatment and in greater effect as compared to the benchmark ICI-non-responder treatment.

[0365] The same methodology with the BP melanoma mouse model was conducted using Consortia 2 and Consortia 5, each as set forth in Table 3, as well as a non-responder FMT control. Results are shown in FIG. 14 and show a similar pattern as in the previous study, with the microbial consortia reducing tumor volume as compared to control.

[0366] The microbial consortium of the invention performs in multiple mouse models, including in a specific pathogen free mouse model of colorectal cancer. In this model, 8-week-old female C57BL/6J specific-pathogen-free mice were first treated with antibiotics to deplete their endogenous microbiome. The antibiotic treatment consisted of neomycin (100 mg/kg), vancomycin (50 mg/kg), streptomycin (50 mg/kg), colistin (10 mg/kg), and amphotericin B (1 mg/kg), delivered as a 200 uL oral gavage every 12 hours for 7 days. The following day the mice received a slurry containing 20 mg FMT or Consortia 2, as set forth in Table 3, in PBS with 10% Glycerol (w/v). Mice were orally gavaged QD three times with 200 μL of the slurry every other day. 800,000 MC38 cells were injected subcutaneously in the right flank of each mouse 7 days post-FMT or microbial consortium treatment. Once tumors reached an average size of 250 mm3, typically day 10-12 after tumor injection, mice were then dosed 3 times with 200 μg αPD-L1 antibody, administered intraperitoneally every other day. A final tumor measurement was performed at the end of study, 4 days following the last dose of αPD-L1 antibody.

[0367] The results are shown in FIG. 15. These data demonstrate the ability of Consortia 2 to act in a similar fashion to the complex super donor fecal material and inhibit tumor growth in combination with ICI relative to the benchmark non-responder control, in a mouse model that had a pre-existing microbiome. These data also demonstrate the ability of the microbial consortium to impact tumor growth in a model of colorectal cancer.

[0368] In another study, 8-week-old female C57BL/6 germ-free mice received a slurry containing 100 mg/mL FMT or microbial consortium in PBS twice on 2 consecutive days. Mice were orally gavaged QD with 200 μL of the slurry during the first administration and 100 μL during the second administration. 800,000 MCA-205 tumor cells were injected subcutaneously in the right flank of each mouse 14 days after the last FMT or microbial consortium treatment. Six days after tumor cell treatment, mice were then dosed with 4 doses of 250 μg αPD-1 antibody, administered intraperitoneally every third day. A final tumor measurement was performed at the end of study, 2 days following the last dose of αPD-1 antibody.

[0369] The results are shown in FIG. 16. These data demonstrate the of Consortia 2, as set forth in Table 3, to inhibit tumor growth to an even greater extent than the complex super donor fecal material and the fecal material from the ICI responder. These data also demonstrate the ability of this microbial consortium to impact tumor growth in a fibrosarcoma mouse cancer model.

[0370] This methodology using the MCA205 tumor model was also conducted in a study comparing the effects of treatment with Consortia2, 3, 4, and 6, each as set forth in Table 3, on tumor volume, as compared to fecal suspension from a benchmark ICI nonresponder. All microbial consortia reduced tumor volume as compared to the nonresponder control. Results are shown in FIG. 17.

[0371] Consortia 2 was shown to reduce tumor prior burden prior to ICI treatment in multiple mouse models. FIG. 18 data depicts the smaller tumor sizes in the Consortia 2 group at day 6 after tumor cell administration, prior to ICI administration. The day-6 timepoint shows each mouse as a separate point on the plot.

[0372] In another similar study, a specific-pathogen-free mouse model with the EO771 breast adenocarcinoma cell line was used. In this model, 7-week-old female C57BL/6J specific-pathogen-free mice were first treated with antibiotics to deplete their endogenous microbiome. The following antibiotics were provided to mice in their drinking water for 3 days: ampicillin (1 mg/mL), streptomycin (5 mg/mL), and colistin (1 mg/mL). After a 1-day washout period, the mice received a slurry containing 100 mg/mL FMT or Microbial Consortium 2 in PBS. Mice were orally gavaged QD with 200 μL of the slurry during treatment #1 and 100 μL during treatment #2. Two weeks after the last FMT or microbial consortium treatment, 500,000 EO771 tumor cells were injected subcutaneously in each mouse, and tumor growth was monitored.

[0373] Results are shown in FIG. 19 demonstrating tumor volume 10 days post-FMT or microbial consortium treatment. Tumor volume was lower in the Consortis 2-treated group and the super donor treated group as compared to ICI responder, non-responder and no treatment groups.

### Example 6: Microbial Consortia and Engraftment

[0374] Mouse engraftment data was used to support bacterial inclusion or exclusion in microbial consortia. Five strains showed poor engraftment and overlap with the non-typical gut commensals described herein.

[0375] Human engraftment data was also collected in the MD Anderson Cancer Center clinical study NCT04792322 using sequencing data obtained from metagenomic sequencing of stool samples following FMT from the super donor.

[0376] FIG. 20 shows results from the clinical study pre- and post-FMT. Prior to FMT from the super donor, the clinical study patient samples were studied to detect bacteria specifically identified from the super donor isolates. As expected, the values were near zero. Post-FMT analysis, however, shows substantial engraftment of isolates from the super donor in the fecal samples from the clinical trial patients.

[0377] The strains identified in the super donor fecal samples made up a significant proportion of each recipient's total microbiome.

[0378] Data was also compared on isolate engraftment across both the human clinical study patients and the mouse models. The comparison is shown in the FIG. 21 plot. The upper plot shows engraftment in various mouse models treated with Microbial Consortium 1 and Microbial Consortium 2 as compared to treatment with super donor FMT. The correlate values for super donor stool is aligned at the top of the plot. Each vertical column represents a bacterial isolate. The lower plot shows the engraftment results in human studies in which ICI cancer patients received super donor FMT. Relatively similar engraftment patterns are seen across the human and mouse engraftment data following super donor FMT as well as in mice treated with the microbial consortia.

### Example 7: Increased Tumor Infiltrating Cytotoxic Immune Cells

[0379] Tumor transcriptomic data suggest that the microbial consortia of the invention promote the infiltration of cytotoxic CD8 T cells and NK cells and also promote the reduction of pro-tumor M2 macrophage signatures and immune checkpoint expression with which they are associated. In tumors from ICI treated mice who received previous administration of fecal suspension or microbial consortium, the prominent cells in the tumors were T cells, B cells and myeloid cells in non-responder fecal-suspension treated mice, T and NK cells and myeloid cells in superdonor treated mice, and NK cells and CD8 T cells in microbial consortium treated mice. Cytotoxicity profiles were highest in the microbial consortium treated mice. Immune checkpoint expression was lowest in the microbial treated mice. RNA expression profiling also demonstrated an increase in genes mediating an interferon response in non-responder treated mice, and, in the super donor treated and microbial consortium treated mice, an increase in gene expression related to olfactory signaling and antimicrobial response.

### Example 8: Phylogenetic Trees

[0380] Phylogenetic trees were constructed from all super donor donations to construct the super donor microbiome and for all bacterial species exceeding 0.1% relative abundance (Super Donor Microbiome, see FIG. 22, left hand picture) and for the species isolated, cultured, and banked (Super Donor Isolates, see FIG. 22, right hand picture). The key phyla are shaded in four groups, starting with Bacillota in the lower right and, moving in a counterclockwise direction, Bacteriodota, Actinomycetota, and Verrucomicrobiota. The representation is similar between Super Donor Microbiome and Super Donor Isolates.

### Example 9: Efficacy of Consortia 7

[0381] A study was conducted to evaluate the ability of Consortia 7 to induce inhibition of tumor growth in combination with anti-programmed cell death protein 1(PD-1) ICI. Germ-free mice were first engrafted with a candidate consortium and then challenged with MCA205 fibrosarcoma cells before being treated with ICI. As depicted in FIG. 23, six-to-eight-week-old female C57BL/6 GF mice receive a microbial mixture, either as a slurry containing 100 mg/mL of stool in a PBS solution, or Consortia 7, prepared as described in the section below.

[0382] Mice were orally gavaged with 200 μL of the consortium or fecal-derived microbial mixture QD on Day −15, and 100 μL on Day −14. 800,000 MCA205 tumor cells were injected s.c. in the right flank of each mouse 14 days post-microbial mixture treatment. Six days after tumor cell injection, mice were dosed with 250 μg anti-PD-1 antibody, administered i.p. every third day. A final tumor measurement was performed at the EOS, 2 days following the last dose of anti-PD-1. Fecal material for metagenomic engraftment analysis was collected from each mouse following microbial engraftment at the time of tumor injection and/or at the EOS.

[0383] To prepare Consortia 7 for oral gavage and colonization, two research cell bank (RCB) vials of each strain comprising candidate consortia were anaerobically pooled into a sterile container. The average viable cell count (VCC) of the pooled material was approximately 6×108 cells/mL. After gentle resuspension, the mixtures were aliquoted into 0.9 mL aliquots for cryopreservation at ≤−65° C. On the day of administration, the input candidate consortia were thawed and immediately introduced by gavage as a cell suspension. Each study included a negative control microbiome comprised of fecal material from cancer patients who did not respond to ICI therapy, which served as a benchmark for poor tumor control. The NR stool for the MCA205 model was sourced from a NR non-small cell lung cancer (NSCLC) patient.

[0384] Results of this experiment are shown in FIG. 24-26. FIG. 24 shows a comparison of the ability of Consortia 7 to reduce tumor area compared to the control of a non-responder FMT over time, showing a significant trend of reduced tumor size post dosing. FIG. 25 shows the tumor size comparison of treatment with Consortia 7 compared to a non-responder FMT at day 6. FIG. 26 shows that there was no negative effect on the weight of the mice upon administration of Consortia 7.

### Example 10: Manufacturing of Consortia 7

[0385] Consortia 7, as set forth in Table 3, was manufactured by growing the strains in 3 different buckets (i.e., drug substances or DSs). FIG. 27 shows the final DSs that were designed for optimal growth.

[0386] The optimal growth was determined by the following steps:

[0387] 1. DS strains were grouped based on growth kinetics and cross feeding/interactions.

[0388] 2. Modification for relative abundance for Consortia 7 strains by inoculum optimization for each strain at the seed stage (see FIG. 1) and impact on the main fermentation.

[0389] 3. Modification of biomass yields as well as relative abundance by media optimization and fermentation parameter optimization.

[0390] 4. Modification for the best cell health at harvest through inoculum densities and functional assay testing.

[0391] Based on the above described methods, the 3 DSs were designed as follows: DS1 (fast growing strains), DS2 (medium growing strains), and DS3 (slow growing strains). See FIGS. 28A, 28B, and 28C for the growth curves and bucketing of each of the strains of Consortia 7. For this experiment, appropriate dilutions were picked from the growth curves data to obtain similar mid-log growth timing for each strain in the DS bucket.

[0392] Each of DS1-DS3 was further modified for co-culture fermentation. FIG. 29 depicts the DS1 co-culture fermentation process for the 20 strains included in DS1. FIG. 30 depicts the DS2 co-culture fermentation process for the 19 strains included in DS2. FIG. 31 depicts the DS3 co-culture fermentation process for the 20 strains included in DS3. While YCFAC (Teknova) media was shown to work, a special medium was custom designed. This special medium is termed YSFAC and is a derivative of YCFAC medium with soytone used in place of casitone for improved growth. Furthermore, the medium for DS3 had to be modified to include threonine and N-acetylgalactosamine to promote for growth of the slow-growing strains.

[0393] In developing the buckets for the DSs for improved growth, it was observed that Akkermansia muciniphila and Faecalibacterium prusnitzii were particularly slow and finicky strains. They were originally included in both DS1 and DS2; however, neither strain grew in either DS to a robust and detectable density. In order to determine how to grow Faecalibacterium prusnitzii, it was tested in monoculture in a bioreactor to obtain lag times and base draw information. In the bioreactor, Faecalibacterium prusnitzii showed robust growth as a monoculture in YSFAC media. Based on the growth curves, it was determined that Faecalibacterium prusnitzii would be best suited for DS3.

[0394] DS3 fermentation was initiated with a starting culture of 10 strains with GalNAc because Akkermansia muciniphila preferentially utilizes GalNAc over glucose as a carbon source and exhibits threonine auxotrophy and N-Acetylgalactosamine is a key component of mucin and serves as the core sugar in mucin O-glycosylation. A depiction of the initial experiment is provided in FIG. 32.

[0395] However, the initial attempt of including both Akkermansia muciniphila and Faecalibacterium prusnitzii in DS3 failed (see FIG. 32 for initial process that failed). While Faecalibacterium prusnitzii was detectable using this method, Akkermansia muciniphila was absent or undetectable. Furthermore, Alistipes onderdonkii, which was originally in DS3, was moved to DS2 because despite its initial slow growth curves in monoculture, it outcompeted the other strains in DS3 by a relative 90% abundance and was determined to outcompete Akkermansia muciniphila for GalNac.

[0396] DS3 was further modified by addressing quorum sensing (i.e., the requirement of a certain starting density to grow and thrive) for Akkermansia muciniphila. Accordingly, it was attempted to promote Akkermansia muciniphila growth in DS3 by generating a starting monoculture of Akkermansia muciniphila in a seed flask and adding it to the bioreactor after it reached a certain density. The improved process is depicted in FIG. 33. The improved process was successful and both Akkermansia muciniphila and Faecalibacterium prusnitzii were detectable at harvest in robust abundance.

[0397] Furthermore, while the methods of growing Akkermansia muciniphila and Faecalibacterium prusnitzii were developed for DS3, the same method can be used for any monoculture or co-culture method developed for any consortia.

### Example 11: Additional Methods

### Bacteria Isolation

[0398] Media was obtained from Anaerobe Systems (Morgan Hill, CA), Teknova (Hollister, CA) and Biochemazone (Leduc, Alberta Canada).

[0399] For the conventional method, stool samples from a Sep. 22, 2022 donation from the super donor were serially diluted and mixed with glycerol to a final concentration of 25%, then cryopreserved at ≤−65° C. These serially diluted aliquots were subsequently used for direct plating on agar plates with various microbial cultivation media designed to support anaerobic growth (passage 1), followed by incubation under anaerobic conditions at 37° C. Over the course of several days, the plates were monitored for the emergence of microbial colonies.

[0400] Single colonies from these initial plates were picked and transferred to fresh agar plates with appropriate media for further purification (passage 2). After incubation, if single-colony plating resulted in uniform colony morphology, species identification was performed using high-throughput MALDI-time of flight (MALDI-TOF) mass spectrometry. If multiple morphologies appeared, each distinct colony type was selected and plated again on appropriate media for further isolation until uniform morphology was achieved (passage 3 or beyond).

[0401] Colonies identified as species of interest were then propagated in liquid culture, stored in cryovials with cryoprotectants to generate purified isolate stocks, and species-confirmed through full-length 16S rRNA gene sequencing or whole-genome sequencing (WGS).

[0402] For the MALDI-based liquid culture isolation strategy, fecal material donations from the three separate time points were used. The isolation process began with liquid culture techniques, wherein a single cryovial aliquot of donor stool at the appropriate dilution was thawed and further diluted in media to achieve an estimated one cell per well in 96-well plates. The plates were sealed with plastic film and parafilm, and incubated at 37° C. for 1 to 21 days. Growth was monitored through visual turbidity and optical density measurements. As expected, approximately 30-40% of wells showed no growth, consistent with the target inoculum of one cell per well. Wells with visible growth were harvested, and the cultures were consolidated into a 96-well hit-pick plate.

[0403] Once the cultures were on the hit-pick plate, the contents of each well were split into three portions, designated for three specific purposes: (1) cryopreservation of purified isolate stocks, (2) MALDI identification, and (3) high phylogenetic Resolution Florescence (HiPR)-ID identification. For cryopreservation, cultures were mixed with glycerol to a final concentration of 25% and stored at ≤−65° C. for future use. For MALDI identification, cultures were washed with 1×PBS, deposited onto single-use MALDI Biotyper (MBT) biotarget plates embedded in a matrix, and analyzed using a Bruker Microflex LT MALDI-TOF for proteomic characterization and preliminary species-level identification. For each well of interest identified by MALDI, the corresponding cryopreserved portion was reanimated with either growth in liquid media or on solid media and ultimately species-confirmed through full-length 16S rRNA gene sequencing or whole-genome sequencing.

[0404] For targeted liquid culture isolation, a December 2023 donation was used. In addition to what is described above for MALDI-based isolation, for HiPR-ID imaging, the cultures were fixed in formaldehyde and stored in 50% ethanol until further analysis. HiPR-ID assays were conducted by depositing cultured samples onto slides, followed by probe hybridization of a panel constructed from taxa uncovered by PacBio 16S sequencing of donor material. A pan-microbial probe (EUB) or DAPI staining was used for general microbial visualization, as most cultures were not expected to exhibit HiPR-ID probe panel signals since the panels targeted specific, often rare, taxa. Samples were visually scanned, and high-interest hits were imaged and analyzed for panel signal and other features to create a list of high-priority wells. Microbial cultures from the corresponding cryovials were streaked onto agar plates; resulting colonies were picked, checked with MALDI, propagated in appropriate liquid culture, and banked in cryovials with cryoprotectant to generate purified isolate stocks. Species were confirmed using full-length 16S rRNA gene sequencing or whole-genome sequencing.

### Sequencing

[0405] Short-read Illumina and long-read Nanopore sequencing was collected for each strain using standard extraction and library preparation procedures. Sequences were assembled into high-quality hybrid genome assemblies using Unicycler. Taxonomic assignments were made using GTDB-tk and strains without a species name were given the FBI number as the species name.

### Methods of Culture

[0406] Research cell banks (RCBs) were generated from purified isolate stocks. Purified isolate stocks were streaked onto an agar medium which is a modified yeast casitone fatty acids agar with carbohydrates (YCFAC) medium with soytone used in place of casitone (YSFAC). For Akkermansia, YSFAC was additionally supplemented with gal-nac and threonine. Identification was verified with MALDI-TOF spectrometry. Colonies from plates were inoculated into precultures containing appropriate broth media and incubated under anaerobic conditions at 37° C. until sufficient growth was observed. Total cell count (TCC) and percent viability were measured and precultures were used to inoculate main cultures in appropriate broth media. Main cultures were incubated under anaerobic conditions at 37° C. until sufficient growth was observed. TCC and percent viability were measured, and sterile glycerol solution was added to achieve a final glycerol concentration of 25% (v/v) prior to aliquoting approximately 0.9 mL into 2D-barcoded cryovials.

### Growth Curve Studies

[0407] Data was collected by growing species in YCFAC media in a 96-well flat bottom plate and measuring OD 600 every hour for 72 hours using an optical plate reader. Growth curve studies were started by thawing one vial of each RCB and creating a serial dilution in 200 μL of YCFAC medium. E-1 designates a 10 fold dilution of the original, E-2 is a 10 fold dilution of E-1 (1/100th of the original solution) and so on for 7 serial dilutions. Each individual curve is the average of three replicates.

[0408] Other embodiments are within the scope of the following claims.

[0409] While the present invention has been described at some length and with some particularity with respect to the several described embodiments, it is not intended that it should be limited to any such particulars or embodiments or any particular embodiment, but it is to be construed with references to the appended claims so as to provide the broadest possible interpretation of such claims in view of the prior art and, therefore, to effectively encompass the intended scope of the invention.

[0410] All publications, patent applications, patents, and other references mentioned herein are incorporated by reference in their entirety. In case of conflict, the present specification, including definitions, will control. In addition, section headings, the materials, methods, and examples are illustrative only and not intended to be limiting.

The application's sequence listing, which the Patent Office published only in electronic form, follows.

SEQUENCE LISTING (720 sequences)

SEQ ID NO: 1 - DNA, 3126624 bp, Ruminococcus sp. (residues 1-1,563,312 of 3,126,624)
  source 1..3126624: mol_type = genomic DNA
atgaacattgtagaagaaaactgggagcagattttgaataagatgaaactagaatattgctcatccaatatttcgtataacacgtggattgcaccgctaactgtatacgaagtaaccgatgataccgtatatattcttgtaaaattacgtgccagcctggagcacattgaagaaaaatacctgcttccttttaaagtatgtattgcagaagtcacaggttacgaatatgaagtctcttttgtgactgatgatcatgttgtcatccaggaaaaaaaagaaaccgcagtcaaaaaacaacaatcaaatgctatttttgaacaggctaacctgaatcccaaatatacatttgatacttttgtggtgggcagcaataacaattttgctcatgctgcttctctggcagttgcagattctccaggtgaaatttacaatcccctcttcctctatggaggtgtaggacttggaaaaactcatttgatgcattccattgctcattttattctggaaaaagacccaacaaaaaaagttctctatgtaaccagtgagacttttaccaatgaactaatcgatgctttgaaaataggtaaaaacggaaatgaacttgcaatgacgacattccgcgaaaaatacagaaataatgacgttctgctcattgacgatattcagtttatcatcggaaaagaaagtacccaggaagaatttttccatacattcaaccatcttcatgtttctggaaaacagatcatcatctccagtgataagccaccaaaagatatcgaaacactggaagcacgtcttcgtacccgatttgaatggggactgattgcagatatctcctctccggactacgagaccaggatggccattctccgaaaaaaagaggaactggatgggctggagcgttatcacattccagatgaagttatgcagtacattgccaataatattacatccaacatccgtgaactggaaggttccttaaacaaactgatcgcacttgccaatctggaaaacaagccgatcgacattcctctggctgcagaggcactaaaagatatgatttctccgaataatacccgggaaattacacctgaactgattattgaagttgtttctgaccattttaatgtgcccgctgccgaattaaaaggtaaaaagcgaaacgcagaaatcgttctgccacgccagatcgtaatgtacctttgccgcaaaatgacagagactccattaaagacgattggtctgattctcggcggaaaagatcatgcatccgtcagccatggagtcaaaaaaatcgaacatgatattaagacagatgaagctttaaacaatacagttaatatcattaagaagaaattgaatccaatctaatttagaatttataccacattattataaatatatgtttattttctgagggttttttgaccctcagattctttccgtttaagtgtggataattctgtggaaatgctgtgaattataatgttaataaaataatttcgccaagagacgtgtaaagttatacaaacaccgtccccttgttttccatatcgtttctacagacttattaaagtgtacaagccctttatttataaggctttgaagcatttatcaacatattcacaccccctacggcgactaaggcggaaaacttttatatttctctttataagattcgactgctaaaagtttttcactgccattcacatttcacaaattcgaaaggagattatcaacagatgagaatcatatgtacgaaatccaatcttgtaaaaggagtcagtattgtttctaaagctgttccttcaaaaacaacaatgccaatcttagaatgcattttagttgacgcatctacagatgttattaaattaacggcaaatgatatggaacttggaattgaaacccgaattgaaggtgatattttagagcgtggtatcattgctttaaatgccaagattttttctgaaatcgtaagaaagcttccagatagtgatgttgtgatcgaaactacttctgataatcagacaatgatcacttgtgaaaaagcaaaatttaatattgcagcacaatccggagaagatttttcgtatcttcctgtgattgaaaaagaagattatattactgtctcagaatttacgttaaaagaagtgattcgtcagacaattttctccatcgcagataacgatacaaataagatgatgacaggtgaattgtttgaaattgacggcaatatactgaaagttgtctcactagatggtcacagaatctcgattcgtaagatagaattaaaagaaaactatggtcagaagaaggttattgttcctggaaagacacttcaggagatcagtaaaatcattggcggagagtcagaatctgtggtcgatatttctttcacaaagaatcatatcgtttttgaatttgacaaaactgtcgttgtatcacgtttgattgaaggtgattattttaaaatcgatcagatgctgtccagtgattatgaaacgaaagtcagaattaataaaagagagctcctggactgtatcgatcgtgccactctgctgatcaaagaaggcgataaaaagccaattattatcgatatcaaagatggaacaatggaattaaagatcaaatctcagattggttccatggatgaaactatttttattaccaaagaaggaaaagacttgcttattggatttaatccaaaattcctgatcgatgcgcttcgtgtgatcgaggatgaagaagtggatctgtattttatgaatgcgaaagctccatgttttatcaaagatgaaaatcagagttacatttatttgatccttccggttaattttaacgcagttgcgtagaaagtgagtgtttatggaaacaattaaattaagagaaacagatgagtttattaagcttggacaggctttgaaggcagccggactggttgaatccggagtagaagcaaaagaagtgatccaggatggcatggtaacagtaaacggagaggttgacacaagaagaggcagaaaattatatccaggagatattgctgcatttgagggtcaggaaataaaaattgaaaaataagaaaaaaaagtgtaaaatggttacatattgattgatggagaaattatggttatcaaatctttaaagctcaaaaattacaggaattatgaattactggatatgacatttgattcaaagaccaatatcctgtatggggacaatgcccagggaaagaccaatatccttgaggcattgtatttgtcgggaacgacaaaatctcacagaggaacaaaggatcgggatttgatacagtttggaaaagaggagtcacatctggagacgatcgtagaaaaaaaagggatagagttccagattgacatgcatcttaaaaagaatagtccaaaaggaattgcaatcaataaaatcccaattcgcaaagcaagtgaattgtttggaattgtgcattttgtgtttttttcaccggaagatctcaatattatcaaagatggacctgccggcagaagaaggtttgttgatctggagttatcccagatcgacaaagtttatttgagcaatttatccaattataatcgaatcatcaatcagagaaattctctgttaaaagagctttatcatcaggagcatcttctggacacgctggatatatgggatatgcagcttgctgaatatgggacaaaagtgatagaaagtcgaaaacaatttatcagacaggtcaatcagatcatcgcggatatacacgagaagctgacaggtggaagagaaagaatagaactctcttatgaaagcagtatcggaactctttcaatggaacaggcattgaagaaaaaccgggagagggacattcgtatgaaaagtacttctgtgggtccgcacagagatgatctgtgttttctgtcaggagatattgatatccgaaaatttggttcccagggacaacagcggacagctgcgttgtcactgaaattgtccgagattgaactggtgaaagaagtaatcaaagatacaccgattttattattggacgatgtattgtctgaactggacaagcacaggcaaaactatttattagacagtattcatgatatacagacagtgatcacatgtactgggttagatgagtttgtgaatcatcgattttctataaataaaattttccgtgtaaacagcggaagtgtgacgaaagaaaactaggaggtttttaaatgggtgcaacaggtactgaatttgatgcagaatatggagcagaccagattcaaatattagagggactggaagcggtaagaaaaagaccgggaatgtatattggaagcacttctgcgagaggacttcatcatctggtatatgaaattgtggacaatgcggtagatgaagcattggccggatattgtgatacgatccatgtaaatatcaatccggataattctgtcacggtcattgataatggacgtggaatcccggtaggactcaaccacaaagcgggaattcctgctgtagaagtggtatttacgattcttcatgccggtggaaaattcggcggcgggggatataaggtatccggaggtctgcatggtgtaggtgcttctgttgtaaatgcactttctgtatggctggaagttgagatctacaatgaaggcaagatctacaaacagcgttatgagcgcggcaaaacgatgtattcgttaaaagtagtcggagaatgtgatccggaaaagaccggaacaaaagtaacgttccttccggatggagagatttttgaggagacggtctttgagtatgatgtactgaaacagaggcttcgagagatggcctttctgacaaagggactgaaaatcattcttcaggatctccgtgaagaagaagtcagagaacatacatttcattatgagggcggaatcaaagaatttgtcacatatctgaataaaagcaaaacaccactgtatgaccagatcatttactgtgaaggagaaaaagacggcgttgttgtagagatggcaatgcagcataacgattcttacagtgacaatacgtatggatttgtaaataatattacaacgccggaaggaggaactcatattgagggcttccgaaaagctttgacaaagacctttaatgagtatgcgagaaagaataaacttctgaaggatagtgaaccaaatctgtccggcgatgatattcgagaaggactgaccgcgattgtcagtgttaagattggggaaccacagtttgaggggcagacaaaacagaaacttggcaacagtgaggcgcgtggagcagtagataatatcgtcagcacacagcttgagattttcctggaacagaatccatctgttgcaaaacagattgttgaaaaatctgtaatggcacagagagctagggaagccgcgagaaaagcgagagatctgacaagaagaaagtcagcgcttgaggggatgtccctgccgggaaaacttgcggattgttcggataaggatccgaaaaattgtgagatttatatcgtggagggagattctgccggcggttccgctaagactgccagagatcgggcaacacaggccattcttcctttgagaggtaagattctgaatgtagaaaaagcaagactggataagatttatgccaatgcagagatcaaagcaatgatcacagcatttggaacaggaatccatgaggattttgatatttccaagctgcggtatcacaagattattatcatgactgatgccgatgtggatggtgcacatatcagtacgctgcttttgacattcctgtatcgttttatgccggatctgatcaaagaaggctatgtatatcttgcacaacctccactttacaagctggaaaaaaacaaaagagtgtggtatgcatacagtgatgaggaattaaatcagattcttgcagaagtaggccgtgacagcaacaacaagattcagcgttacaaaggtcttggagagatggatgcagaacagctttgggagacgactatggatccggaacaccgtgttcttttgaaagttacgatggacgatgagacatcctccgaattagatctgacatttaccacattgatgggagacaaagtagaaccaagaagagagttcattgaagaaaatgccagatttgtgaaaaatttggatatataagcattggaatatactaaaaaacaaggagaaggaacatggaagataatatttttgataaagtccatgaagttgacctgaaaaagacgatggaaacttcctatatcgactatgcgatgagcgtaattgcatcccgtgcactgccagatgtcagggacggattaaagccggtacagagaagaattctctattcaatgatcgagctgaataatggaccagacaaaccgcatcgtaaatgtgcgcgtattgtcggtgatacaatgggtaagtatcatccacatggagatagttctatctatggagcattggtaaatctggcacaggagtggtctacaagatatcccctggtggacggacatggaaattttggatctgtagatggagacggcgctgctgccatgcgatatacagaggcacgcctgagcaagatttccatggagatgaccgcagacatcaataaaaatacggtagattttgcaccgaactttgatgagacagagaaagagccaaccgttcttccggcaagatttccgaaccttctggtaaacggaacttccggtattgcagttggaatggcgaccaatattccaccgcataacctgcgggaagtgatcggagccgttgtgaagattatagatgaccagattgatgaaaatggggaaacaagcattgacgacattttaaaaattgtcaagggaccagattttccgactggagcagaaatccttggaacaagaggaattgaagaagcatatcgtacgggacgcggaaagatccgtgtgcgtgcgatcaccaatattgagcctatggcaaacggaaagaatcggatcatcgtaacagaattgccatatatggtaaataaagcacgtctgatcgagaaaatcgcagagttagtacgcgataaaaaagtagatggaatcacagatttaagtgatcagtccaaccgtgagggaatgcgtatctgtattgaactgagaagagatgtcaatccgaatgttgttttaaatcagctgtacaaacacacacagctgcaggatacatttggtgtgatcatgctggctttggtcaataatgagccgaaagtcatgaatattctggatatgctgaattattatctgaagcaccaggaagaggttgtgacaagaagaaccaggtatgagttaaacagagcagaagagcgtgctcatatattacagggattgctgatcgcactggataacattgatgaagtgatcaagatcatccgtggctctaaaaatgtccagattgcaaaagaagagttgatgtccagatttgatctgacagaagtacaggcaagcgcgatcgtagatatgcgtctgcgagcactgacaggtctggaacgcgagaagctggaagcagaatatgaagaactgatgaaaaaaatcggagaattaaaagcgattcttgcggacagaaaactgcttcttggcgtaatcaaaaaagaaattctcgtaatttctgaaaaatatggagatgagagaagaacttctattggatttgacgaatatgatatttctatggaagatctgatcccaagagaaaatgttgtgatcaccatgacaaaaatgggatatatcaaaagaatgtccatggatacattcaaaagtcagaaccgtggaggaaaaggaatcaagggaatgcagatccttgaggatgattatatcaaagagctgtttattacaaccacacatcactatattatgttctttacaaacacaggacgtgtatatcgcctcaaaggatatgagattccagaggcaagcagaacggctcgtggtacagcgatcatcaatctgctgcagctgatgccggaggaaaaaattacagcgatgatcccaatccgggagtatgaggacggtcagtatctgttaatggcaactcaaaaaggtcttgtgaagaaaacaccgatcaaagattatgcaaatgtcagaaagaccggtttggctgcgattgtgctcagagaagatgacaagctgattgaagtgaaggttacagatgatgagcaggatgtcattctggttacaaaatacggtatgtgtatccggttcagtgaaaaggatgttcggccgacaggacgagtttctatgggtgttcggggaatgaatctgggagatcatgatgaagtgatcggaatgcagatcagtaaccagggcagctatctgttgatcacatctgaaaagggaatgggtaaacgcaccgatatggatgaatttacaagacagaaccgcggaggaaaaggcgtaaaatgctataagatcacggagaagactggagatgtagttggcatgaaagcggtcgatgaagacagtgaaattatgatgatcaatacagaaggtattgtgattcgtatgaaatgttctgatatttctgtatacggacgaattacatccggtgtaaaattgatcaatcttccggaagatgagaaagtggcaagtattgcaaaagtaagaaaagcatctgcggagatcgatggagaagaaatcgaaatctcagaagatgaggatgaaacagaagttccggttgaaggataagaataaggaatctttgcagtgtgtgcggagattccttttttgtgagaaaaaatgcatttaaaaataaagaaatcagataaaaaactaaaaaacaaataatataaagaaaatatagaaaaaattatgaaattatagtataataaagaaaaaagaaccatacaataaaataacagagcacgagggaaaccagaaaacaaatgattcaaagaaaatccgggaaaggagagtgagtttatgaagaaggcaaagagttggctggcactacctttagcagtttgtatgttggcagttatgattttttcagttgcagaggcgaaggaaaccatttatgaaattccggctgagggaaaccataagattacgatcatcaatacaaatcatattacctggccggtcattggagagatgccgtcgtataaattagaggttcccgcaggtgcacattattttatcaatatggctgaatggacgacgaaggacggagaaaccagattgatggaaacagatcgatttgaagaaggtgagtatgagctttatgtaacatatgaagcgaaggaagggtatgaatttgcagcgccagaacaaatcaatgtgcttccaggaaatgaggtacagggaaaaccggaagtcaaagcatctgaaaatggatggtatcgaattgtaaaatattcatttaaggcaagacagccgggagaacatgtacacgatatactggtagttcaggaaaaactgcctacttgtacggaagacggatacaaggcatgctataagtgtcagtcctgtgaaaagttgtaccttgataaagaagttacacaggaagttacagcagaggaaatacttcttccggcgacaggacatacatttgaaaatggtatctgtactctttgtggggaaacagatccggaatacgtaaaaccacatgagcataccatgacagcaatcccggaaaaaattccaggctgtataacagcaggcaatcaagcatattttaaatgtgaaacttgcggaaaattatatctggatcaagagggtatacaggaaattacggtggaagatataacgttgcagccaacaggtcacacattcaaagacggaatgtgtacctcttgtggagagaccgatccggaatatgtaaaaccgcatgaacataccatgacagcaatagcagaaaaaaatccgacctgtacggaagcaggaaataaggcatactttaaatgtgagacttgtggaaaactgtatctggatcaaaatggaatcaaagaaaccacagcggaagcaatgacagtaaaagcaacaggacaccaattcaaagatggagtctgcacagtttgtaaaacaaaagatccgaattatacagcgccgcatcagcacagtctggttcaagttccagaaaagaagccaacctgtacaacagcaggaaataaagcacattacagatgcgagacctgtaaaaaactatatttggacaaggatgcaaagaacgagacaacattagaaaaagtaaccataaaagctctgggacatacatacaggaatggaaaatgtacagtatgtaatgctcttcttccggcagtaaagaccggtgattatggaaatgattatgccaaatgggtcattggattactgatctcactcaatatcatcgtaggagctatcatttatcgtaaatctaaaagaatcggataaccagatgaaatcacccccttcccaaaagagaaccgggttcttgaaaagagaacaccggctctcttttttatttcaattttgcaggaattatactataatactgaatagtaaaaaagaaaccggatgatttcgataaattctaggaggcattatgattcgtacaatggatgtgagagaaatttcacagaatatcaaagagatgtgtattgaggcaaatcactatctgtcaaaagatatggatgctgcaatgaaacaggcagaacaagatgaaaaatccccacttggaaaacaaatattaggacagctgcaggaaaatttaaagattgcagcggaagatatgatcccaatctgtcaggatacaggaatggcagtcatttttttggaaatcggacaagatgtccattttgagggaggtcttttggaggacgcagtcaatgaaggagttagacaaggatacacggaaggatttttaagaaaatctgtcgtaaaagaccctctgatcagagaaaatacaaaagacaatacacctgcagttcttcatacgaaaattgttgcaggagataaagtaaaaatcaaggttgctcccaaaggatttggaagtgagaatatgagccgggtctttatgctaaaaccagcagaaggaatcgagggagtgaaagaggctattctgacggctgtcagagatgcgggaccaaatgcatgccctccgatggttgttggagtaggaattggtggtacatttgaaaaatgtgcattgatggcaaaagaggcattgacaagagaagcaggagtacattctgagattccatatgtaaaagaaatggaaaaagagatgcttgccaagatcaacagtcttggaataggtccgggaggattgggcggaaccaccaccgcactggcagtgaatatcaatacgtatccaacgcacattgcaggacttccggtaggaatcaatatctgttgccatgtaaacagacatgtcgttcgtgaactttaagagaagaacagaaaggatagtattatggaaagacacttacaggctccgatctcaaaagaagaactaaaaactctaagatcaggagattatgtatacataacaggaactatttatacggcacgagatgcggcacacaagcgaatgtatgaaacattgcagaaaaaacaagatcttccgatggaaatcaaggatcagatcatctattatatgggaccatctccggcaagagaaggacgtccgattggttcggccggcccgacaactgccagccgtatggataaatacacaccgcagcttttagatcttggtatgggtgcgatgattggaaagggaaaaagaactcaggatgtgattgatgcggtagtcagaaatggtgcagtgtattttgctgcggtgggaggagcaggtgcattattatcaaaatgtatcagacaatcagaagtggttgcatatgatgatcttggaaccgaagcaattcgaaaacttcaggtagaaaatttcccggtggttgttgtaatagacagtgaaggaaataatttatatgaaagtgcaatcaaagagtactgcacttataaaaacgactaatttcaggagcagaaaaatgaaacgtattttaatgatggtgtttcggaacatcatactggttccatatatgtggattaaattgtgtcacagagcagcacatccgcaaaattatacactggaagaacatctcgaatttttgaaatggatcgtcctgcgggcaaacaagggcggaaatgtaacgatcgatgctcatggtgtagaaaatcttccgaaagaaaacggattcatgtttttcccgaatcatcagggaatgtacgatgtattggctattttagatgcctgtccgtatccgttttcagtggtggcaaaaaaagaggtaaaagacgtaccgtttttaaaacaggtattttcctgtatgcatgcgtatatgatagacagagaagatatcagacaggcaatgcaggtaatcattgatgtttccaaagaagtacagaatggaaaaaattatttgatctttccagaagggacccgttccagaaatggaaaccagatcggagcattcaaaggtggaagttttaaagcggctacaaaagcaaaatgtccgattgttccggtggcattgattgactcatttaagccttttgataccaaaacaatcagtcaggtgacagtacaagtacactttttggaaccgctgcgttatgaagaatataaaaacatgaaaacaacagaaattgcagaaatagtacacgatcgtattcaaagaacaattgatgaaaactgttcggaaagggctgaaaatcaatgacgttgacacaattgaaatatgtgatcacagtcgctcatgcaggctccatgaatgaagcggcaaggagactgtttatttcccagccgagtttgtcatttgcggtcaaagaactggagacagaaattggaattgatttgtttcgcagaaccaacagaggcatatccgttaccccggaaggggaagagtttatcggatatgccagacaggttgtagagcagtatcagctgattgaatcaaagtacgtgcaaaaagaaaatcaaaagaaaaaattcagtgtttctatgcagcactatacatttgcagtaaatgcctttgtagaaatggtaagacagtttggtatggaacagtacgaatttgcagttcatgaaactaaaacttatgaggtaatccaggatgtcaagaattttaaaagtgaaatcgggattctttatgtcaatgaatttaatcgaaaggttttgacaaaattatttcatgagtgcaatcttgaatttcataaacttcttgaatgcagcatttatgtgtatatgtggaaagggcatccatgggcaaaaagaaaagaaattgagatggaggaattaaatgattatccctgcttatcttttgagcagggaatatacaattctttttattttgcagaagaagtactcagtacgtttgaatataaacagttgatcaaggtagatgaccgggcgaccattttgaatcttatggtagggctgaacgggtatacattatgttcggggattatctgtgaagaactaaacggagaagaatactgtgcagtgaaattaaaatcagaggaagtgatgacgatagggtatctggtcagaagcggtgttgccatcagtcctcttgggaaaaaatatctggaagaaattgcaaaatataaagataaagcattaggaatcaattaaaatattgcagttggcaatagaaaatgcaattcgatatggatattatcgcatcaatcggatattatgtagtaaaagatgcgcttgccaaagataaattacgaaaaaataaaaaagtttgaatttagacattgacattatgacaacagtttagtataatcacatatgcactgttggtgcacaactgaataaaagctgtaaatattacagaaattcaggcgaggagaaatactcaagaggctgaagaggcgcccctgctaagggtgtaggtcgggaaaccggcgcgagggttcaaatccctctttctccgtttggtgttatacaccaaaatatattatcaaaaatgaatttaaaaattcaaaaaaagtgttgacaaacaagaaaacacgtgataatatattaaagctgattcgaaacaggtacatacctgatgagagttagaaaataaaaaataaaaaagttcttgacaaacaaaaaacaacatgataaaatatcagagttgcttcttgaaaacaagaacagcgaagaaccttgataattaaacaatagacaacaaccttgaaaatttcttaagagaagattttttaagaacagcatctaagagatgcacccgtcacatgagaatgtgacagacagtaaaagggatgaattagctagtagttaattctgaccggaacgaacacttttaacgagagtttgatcctggctcaggatgaacgctggcggcgtgcttaacacatgcaagtcgagcgaagcacttttgcggatttcttcggattgaagcaactgtgactgagcggcggacgggtgagtaacgcgtgggtaacctgcctcatacagggggataacagttggaaacggctgctaataccgcataagcgcacagtaccgcatggtaccgtgtgaaaaactccggtggtatgagatggacccgcgtctgattagctagttggtggggtaacggcctaccaaggcgacgatcagtagccgacctgagagggtgaccggccacattgggactgagacacggcccaaactcctacgggaggcagcagtggggaatattgcacaatgggggaaaccctgatgcagcgacgccgcgtgagcgatgaagtatttcggtatgtaaagctctatcagcagggaagaaaatgacggtacctgactaagaagccccggctaactacgtgccagcagccgcggtaatacgtagggggcaagcgttatccggatttactgggtgtaaagggagcgtagacggcatggcaagccagatgtgaaagcccggggctcaaccccgggactgcatttggaactgtcaggctagagtgtcggagaggtaagcggaattcctagtgtagcggtgaaatgcgtagatattaggaggaacaccagtggcgaaggcggcttactggacgatgactgacgttgaggctcgaaagcgtggggagcaaacaggattagataccctggtagtccacgccgtaaacgatgaatactaggtgtcgggtggcaaagccattcggtgccgcagcaaacgcaataagtattccacctggggagtacgttcgcaagaatgaaactcaaaggaattgacggggacccgcacaagcggtggagcatgtggtttaattcgaagcaacgcgaagaaccttacctggtcttgacatccctatgaccgctctttaatcggagctttccttcgggacagaggagacaggtggtgcatggttgtcgtcagctcgtgtcgtgagatgttgggttaagtcccgcaacgagcgcaacccctatctttagtagccagcattttggatgggcactctagagagactgccagggataacctggaggaaggtggggatgacgtcaaatcatcatgccccttatgaccagggctacacacgtgctacaatggcgtaaacaaagggaagcgaacctgcgagggggagcaaatcccaaaaataacgtctcagttcggattgtagtctgcaactcgactacatgaagctggaatcgctagtaatcgcgaatcagaatgtcgcggtgaatacgttcccgggtcttgtacacaccgcccgtcacaccatgggagtcagtaacgcccgaagtcagtgacccaaccgtaaggagggagctgccgaaggtgggaccgataactggggtgaagtcgtaacaaggtagccgtatcggaaggtgcggctggatcacctcctttctaaggagaaagaagtagaggaagtaagagctattgtttaattatgagggttcatcaagaactcaacttttttggtggcgatgcgctcaggggaaacacccgtacccatcccgaacacgatggttaagacctgagcggccgatggtactgcactggagacggtgtgggagagtaggtggccgccaaaactaaaaaagaatatgggcttatagctcagccggttagagcgcacgcctgataagcgtgaggtcggtggttcgagtccacttaagcccatatctatcaattaaatatgggggattagctcagttgggagagcgcctgccttgcaagcaggaggtcacgagttcgaatctcgtattctccacttgattctatgcttcatagaatcagatgtaccttgaaaattgcatacaaagagaaatatcttatgaaaataagagagttgaataaaattcaacaagacatccgaggtaatgttaacaacattataacaaacaaactattaccaacgcatgtaacgctatacatgtgtcgatgagaaacaacccgtgtttcttgtcagttggttatgctaataagagcgtatggtggatgccttggcactaagagccgatgaaagacgtgataagctgcgaaaagcttcggggaggagcaaatatcctgagatccggagatatctgaatggggaaacctacttgagaagacctcaagtatccacagcccaatccataagctgtggaagggaacccggtgaactgaaacatctaagtagccggaggaagagaaaacaacatgtgattccgtaagtagcggcgagcgaacgcggaagagcccaaaccggagtgcgtgcactccggggttcggactgcagaatcgatgagtgagcctagtagaatggttttgggaaagccagccagagagggtgaaagccccgtacacgaaaggcgagcgagcgaagcaggatccagagtaccacgagacacgtgaaaccttgtgggaatgcgcggggaccaccccgtaaggctaaatactccttagtgaccgatagcgcatagtactgtgaaggaaaggtgaaaaggaccccgggaggggagtgaaagagaacctgaaaccatatgtttacaagctgtggaaccgctttatatgcggaaccgcgtactttttgtagaacggtccggcgagttacgctggctggcgaggttaagcactgaaggtgtggagccgaagggaaaccaagtctgaagagggcgaaatagtcagtcggagtagacccgaaaccgggtgatctatccatgtccaggttgaagttgccgtaaaaggcaatggaggaccgaacccacatccgttgaaaagggtggggatgaggtgtggataggggagaaattccaatcgaacccggagatagctggttctcctcgaaatagctttagggctagcctcatgcaagtcttacggaggtagagcactgaattcctaagggggcgtcaaagcttaccaagggatatcaaactccgaatgccgtgtagatggtgcatgggagtcagactatccgagataagttgggtagtcaaaagggaaagagcccagacctacagctaaggtcccaaaatgtgtgttaagtggaaaaggatgtgggatttcgaagacaactaggatgttggcttagaagcagccatccattaaaagagtgcgtaatagctcactagtcgagaggtcctgcgccgaaaatgtccggggctgaaacacactaccgaagcttaggaattgatgaatgtcaattggtagaggagcattcttaacggggcgaagctgtaccggaaggagcagtggactgttaagaagagagaatgccggaatgagtagcgagaggaaggtgagaatccttccggccgaatatctaaggtttccagagtaaagctgatctgctctgggtaagtcggggcctaaggcgaggtcgaaagacgtagtcgatggataacaggtaaagattcctgtactatatcataacagaactgtggggacgcagacagagagcataagccgggaatggaaaaaccggtacaagcgaggtaggagtgcatcaggcaaatccggtgtacaatctgaagacgtgacgtggggcgtaaagccggaagtatgtgagctggctgccaagaaaagccgctattgtttatgatatacccgtaccgtaaaccgacacaggtggatgaggagagaatcctaaggccgacgggagaagcattgttaaggaactcggcaaaatgactccgtaacttcgggagaaggagtgccatgtaaaagtggccgcagagaattggcccaagcaactgtttagcaaaaacacaggtctatgcaaaaccgaaaggtgaggtatatgggctgacgcctgcccggtgctggaaggttaaggggagaggttagtcgtaaggcgaagctttgaacttaagccccagtaaacggcggccgtaactataacggtcctaaggtagcgaaattccttgtcgggtaagttccgacccgcacgaaaggcgtaatgatttgggcactgtctcaacaatgcacccggtgaaattgaaataccagtgaagatgctggttacctgcgccaggacggaaagaccccatggagctttactctagcttgatactgggattcgatattgcatgtacaggataggtgggagactgagaactgatgacgccagttgtcagggagtcactgttgggataccacccttgtagtattggatttctaaccagcagccgtgaaccggctgggggacaatgtcaggtggggagtttgactggggcggtcgcctccgaaagggtatcggaggcgctcaaaggttccctcagaatggttggaaaccattcgaagagtgcaaaggcagaagggagcttgactgcgacaccgacgggtggagcaggtacgaaagtaggacttagtgatccggtggtataaagtgggattgccatcgctcaacggataaaagctaccctggggataacaggcttatcactcccaagagttcacatcgacggagtggtttggcacctcgatgtcggctcatcgcatcctggggctgaagtaggtcccaagggttgggctgttcgcccattaaagcggtacgcgagctgggttcagaacgtcgtgagacagttcggtccctatccggcgtgggcgtaggatatttgagaggagctgcccttagtacgagaggaccggggtggactggccgctggtggatctgttgtattaccaaatgcatagcagagtagccaagccgggacgggataaacgctgaaggcatctaagcgtgaagcccccctcaagatgagatatcccataacgtcaagttagtaagaccccttgaagacgacgaggtagatagggcagaggtggaagtgtggtaacacatggagctgactgttactaataggtcgagggcataaccaagcaaggtgataggaaaaaggatgattctttgtatgcagttttgaaggtacaatatatatcttcaatatggcccagtggctcagttggttagagcgccgccctgtcacggcggaggtcgagagttcgagtctcttctgggtcgtttaagatggggtcttagctcagctgggagagcatctgccttacaagcagagggtcacaggttcgagccctgtaggccccacttattaaataaggatggattcccgagtggccaaagggggcagactgtaaatctgttggcaacgccttcgaaggttcgaatccttctccatccatttgagtaccgaaaggactcagtaaagttgccgatgtggctcaattggcagagcagctgatttgtaatcagcaggttatcggttcgagtccgatcatcggcttttctcataagagaaaaatttaatatcgcggggtggagcagtctggaagctcgtcgggctcataacccgaaggtcgtaggttcaaatcctgcccccgcaatttagactttttaagtcttatgcccagatagctcagttggtagagcagaggactgaaaatcctcgtgtcgctggttcgattccggctctgggcattttcgttgccaggagcagcgagataattaaataagggcgtgtagctcaggtggtagagcacttgacttttaatcaagttgtccggggttcgaatccccgcacgctcattgtaggacaagcagagttgcttgttttttttattatattttttaagtcttcgacatttattttggtttacaagacagtgaaacaaaagatataataaaggcaaatgtgcagacagaaatgtttgcataaaaagggtatatggaaagagaggaatgcatatggaaaaggcaaaggatgtgagtatgcaaaatatttataagttggatggaagggtgcccttggggagggcagttccatttggtttacagcatgttttggcaatgtttgtctcaaatttgactccgattacgattataggagcagcttcgggactggaacagggacagttggcgatattgctgcagaatgcaatgtttatagcaggtattgcaacattgattcagttgtatccaatctggagagttggagcaaagcttccgattgtgatgggtgttagttttacttttgtaacgattttgagttatgttggaagtacatatggttacgaaacgatggtaggagcagtgattataggcggcttgtttgaaggaacacttgggctgcttgcaaaatactggaagcggatcattacaccggttgtggcagcatccgttgtgacagcaattggatattcgttatttacggttggcgcacggtcatttggagggggctattcggacgattttggttctgcacagaatttattgctgggtaccattacattggtaacttgtattgtgtttaatattcttgcaaaaggctattggaagcagctttcggtattagctggactgatcgtaggatatatcattgcactgatcatgggagttgtagatttatctggaattatgtcagggggcatcatttcacttccgcatattctgccgtttaagccggaatttcatgttggagcaattgtatcagtagcgattattttcctggtgtcagcagcagagacaattggtgatacaaccgctatggtatccggaggactgaaccgtgaaattacaacaaaagaaatttcaggatctcttgcatgcgatggctatgcaagctgcatttccggtttgtttggatgtccgccggttacttcttttagtcagaatgtaggattgatcaatatgacaaaagtagtcaatcgatttacaattatgacaggcgcagtatgtatgattctggcaggtcttcttcctccggttggaaacttttttgcgagtcttccggatgcagtactggggggatgtacgattatgatgttcggaacaattatggtcagtggaatccagatgatttcgaaagctggattttcacagagaaatattacgattgtggcactttctcttgcagttggaattggatttacttcggcaagtgagatggatatctggagaattttcccgcaggttgtacaggacgttttctcagccaattgtgttgcagttgtatttgttgtttccattgttttaagttttgtattgccgaaggatatggacatcaagaaattggaaggataagtggtcataaaagaaactggagatatgtatggaatacttatatgacaaattaaaggcatatgacagttcagattattatggatttcatatgcctggacataagcgaaatccagatattacaaaagtggatcttccatatggaattgatatcacagaaattgaaggatttgataatctgcatcatgcagaggaagttctaagagaagtacagattcgagcggcatcattgtatcgagcggaagagacacattatttgatcaatgggagtacagcaggaattttgagtgcggttatgggatgcacaaaaaagggcggaaagattttaatggcgagaaattgtcacaaatcagtctatcatgcggtgtttttgaatgaactgcatccggtttatctgtatccggaatttgatgaaacaatggaattaaatgtggcagtgtctccggaaaaaatagagtgtatcctggaagaagagaagaacattcaggcagttgtactgacatctccgacatacgacggagttctttcggatattgaaagaatttcaaaaatagtacatcggaaagaaattccgctgatcgtagatgaggcacatggagcacattttggatttcatccgtattttcctgaaaatgcgaatacaaaaggtgcggatgtagtgatccacagtcttcataagacacttccggcattgacacagaccgctttgatccatttaaacgggaacttaattgatcgaaggagaatacgaaattatctgcaaatatttcaaacaagtagtccttcctatgtgttgatgtccagtatggatgagtgtctgcggacagtaatgaagcggggagaggagctgtttgagcgctatgtaaggaatctggaatatacaagaagacaactgaggaagttaaaacagattcggctgctggagacagaggcatttgacagatccaagctggtgctgtcggtaaaggataccatagagaaaaaagaacaccgttcctttactgggaaaatgttgtatgaaaagctgctgtctgactatcatttgcagatggaaatggcagcaggctcttatgtaatcgcaatgacttcgattggagatacgaaggaggggatggatcgactggtctgcgctctcgttgaaatcgatgcacaactggagaaaaaacagggagaacaacaatcatatgatctgccacgtctggaacagatctacacaagtgctgaagccgaagaaaagcggatcatgggaaatacacagagcagattatggcaacaggcagcagggatggtcgcgatggaatatgcatatttgtatcctccgggaattccattgattgttccaggagagcggatgacagaagaaactgtaaagaaaatggaagattatcagagaaaaggattttctgtggagggaatctgtgtggaaaactatatcgaggtgttgataaatgagtaaaattttttatgtcatggggaaaagttcttccggaaaagatacgatttataagaaattaaaagaaaagcttcctcagtttaagagtattacaccgtatacaacccgcccaatccgggaaggggagacggacggtgtggaatatttttttgtggatgaggaaatgctccatcagatgcaggaaaatgaacaggtgatagaagttcggtcttatcatacaaaatgtggaatctggacgtattttacggcagatgacggacagatcgatttaaaaaatcaggactatctggtgattggaacattggagtcctattatggaatgaaagaatattttggggaagatgtgatcattcccatttatattgaggtggaagacggattgcgtctggagagagcccttgatagagaacgcagacagaaagaaccaaagtatgcagaaatgtgcaggagatttctggcagatgcagatgatttttcagaagaaaatttaaaaaaggcaggaattttacagcggtttgaaaatgtggaattagagaagtgtctcgaagaaattatggagttgattcgaaaagagacggcaggattttaaaatcataggacaaattaagaaaagagaaacagacgaatgttaaatatatcgtttgtttctcttttttgctttacaaaagtttaacctgtgattgaagtgtagtttaaaagagtccattataatagccaacgtgtcatgaagaaaggatacaatttgatgttaaagaaagtaataaaagatgcattccctaccgtgttggcatttacgatgtcaggaatgtacagcgtcgtagatggaatgtttgtaggaagggcagcaggagatacaggacttgcagcaatcaatattgcgtggccgattccggcattgatcactgcactcgggatagggatcggaacaggaggaagcgtgttgtattctcattaccgggggtgtggtgaaaaacagacttgcaaagaattgctggaatgtaccataacgctgctgacaggatgcggaatagggatcattcccgtgttgtttttgatccagattccttttctggagttcctcggagcaagtggaaccatccagacggaagcagtgaaatatacaacgatcattattgccggaagtatgtttcaagtggcaggaacaggaataatgcctgttttgagaaacaaaaatcactctctgggagcaatgctctgtatggcagcaggatttgcagtaaacctgacagtgaattatattctgatgttccgatacaatctgggaatccggggagcagcatttggaaccgttgcagcacagggagtagtcgtgatcctggcaggcatgattttgtggaagacagaatgcagaggctggaaattattttgcagatggaagtacgtgacgaatatttttaaaattggcgtcactgcattcggaacgtctctggcaccgacagcagctcttatttttaccaatctgcagtgtctgcgttatggtggaaatgcagcagtttcatgttatgccgtgatttcgtatattgtgtttccggtgcagtatttcttgacgggaatcggagaaggcatacagcctttgctcagtttttaccatggagccaagaaaaaggaagaagtacaggaaattaaaaagattgcttatacagcagaaattgtgctgggaattatggcagcagcagtcacgatctggatgactccgtatattggcagttggtttggattatcacaagaatcaaacacgtatttttcgtctggaatgcggatcagtgctgcagcatttttgatgatgggagcagcaaagctaaatgtatcctgcttgaatgcagtgatgaagacgaaaaaagcggtatttatgacgtacatagagagcctggcagtatccccactgtgtctgctgttgtttcctgctttgggaaacatgaacggaatctggctggcgcttccggcgacagcagggattatgacagggatatatgggctgataagaaaggatagacaacatgaaaaataaagtaaaattcaaacaattgggcagcgtaactctgtttgtactgccggcactgattcctctgatcgtgttttggatttatccgattctgcggtctgtctacattagttttacagattgggattatatgacgccggattacaattttgtattttttgataattttatttcattgtttcgggatgccaggttttacgatgcactttggaataccgttgtgtttacagtgggaactctgattccgacgatcgtacttggcctgatgctggcgcttttgatgcagcgatcgttcaaaggaagcggaatcatcaaatttatcttgttttccccgtggatcacaccgacagtggcggtctccattgtatggacatggatttatgatccaggaacaggaattgccaatacagtgctgcggtttttgcatttgccagaactgcaatggatcaaaagttcagatacggcaatgcttgcagtgattatcgtaacggtgtggaagagtcttggatatgcaatgatcttttatctttctgcactggaaaaagttccgaaggaattatatgaagcaagtgggttggacggagcaaaaagctggcagaggtttcgtgatgtgacgattccatgcatttctccgactacatttttcctggtgattattaccatggtcacatctctgcaggcatatgaccagattcagatcctgactcagggcggtccgtccggaagtacaagaacgctgctgtatatgtattatcagctgggattcgaagagtttaatatgggacaggctacagcagtggcgattgtgatgatcgtgatcactgtggtattgtcggcagtacagtttggcgcatcaaaaaaatgggtgcactattaaaaggaaggacaggatatgaaaataaaaacaggaatcgaaaaacttggaaaagggatcattttactgatcttcagtatttttacaatttttccgtttatatggatgattttaagtgcattgaaaacaaaagctgagattatggatgttcgtgcattttttccggcagagtttcaatggcataatttttatcaggttatttttgaatcgccactccttcaatatgtgggaaacagcctatttgtatccgtgatcacattggctttgcagattgtgacaggagctatgatcgcctatgccattgtgtttatggattttaaaggaaagaagatgctgtttgcagtgattatgggaacgtatatgcttccaacggcagcaacctatattccaagctatattattctggcaaactgggatcttctgaatacatttacagggttaattatttcaaattgtgtgagtatatttggaatttttctattaaggcaggcttttatgcaggtaccgatgggactgatcgaagcggcaaggattgatggggcaaattcctggaagattctatggaaggttgtgtgcccgatgacgaaatcatcgtttattacatttggactgatgaactttattacttgttacaacagttatatgtggccgtcactgatcacagatgcggatgagaaaatgatggtttcccagggattgagaaaattttttattgaaggtggagcctatggaaccgaatggccgctggttatggcaggaagcacgctgatcgtattgccccttctgatcttatttgcatttacacagaagtggtttatcaatggaatcggcggggatacgggtatgaaaggataatccttttttacataaagaaagcaaagaaaaacgatacaaactaaaggagaaaaagaaaatgaaaaagagaatcgtatcagcattactggtttgcgtacttggaatgtcttttgtgacaggatgtggaaataaggaagcagcagcggcagaggcaacccaaacagccgatggaaagattcagctggatctctggtattccggaggaaagacggcggtgaatgtatttcaggagatcgtagatgcattcaatgaatcgcaggatacttatgaagtaaagacaacaacacaggcagattacaccgagacgtatgaaaaactacaggcaggaattgccggaaaaaaagctccggatatggcgcttctggatacggataaatccagaaatctgtctcagaaaaatctggtcgcagacatcaacgagtatgtagaaaaagatgaagactttgagaaggatgactatctgtcagtattctatgagcagggagaagatgaggatggaaaattatttgcacttcctgcatatggaacaacacaggtgatgtactataacaaggcagcatttgaaaaagcaggaattgatcccacaacgatcaagacatggcaggatctggaaaaggcagcagagaaaatgacggcctcagatggttcatttgtaggatgggagcctatgtggggcttaggaaatctggtggatgcatcactgagtaacggagcaactcttttgaatgaagacggaacaaaagttatgatcaattccgacgaatgggtggaagtatgggaaagcttccgtacatggattcatgatgacaagatcatgaaagtaaattccggcggacagggctgggaatactggtacacgaccattgatgatgtactgcagaacaaagcaggaggatatacaggttcttccggagatcaggcagatctggattttgagattgtaggggcaatggagcagcctggatttggtgaaaatccgtcagcaccgacagcagatgcgctgcagcttgtcatgcttgaaagttcttctgatgaagaaaaagaaggcgtgtatgaatttatgaaatattttacaacgccggaaaatcaggcaaaatggtccatgggaacaggatatgtagcagttcgggagtctacacaggaagtggaagaatttcaggcttacgcagagaaaaatccgcaggcactggttccacttcagcaggcatctcatggaactccggcacttcaggatccaacgggaggaaagattctggatgctctgacaattgcagcagataaagtagagctggaaaatattccggcgaaggaagcactggatgaagctcagaaaacagcacaggaagcgttggatgcattataaaaatgaaagaacagatcagatttaaaattggaaaagcagaaaaaaatattcaggaaaaatgggtggaaattccgaaagggacagaacagctccagatgacattggaggtaccggaagaatttcggtatatgacatttttatttttggaagatccgaaacaaaagatccggtttcagaagctgctcggatacgggcagcagaatccgggcatcggaaaaacagctcaggatacgacaattggaggggttcccggagagattcatccgggaatctggaaaatcggaatgggaatctttacagaatatgtcgcacaaaaactgggaaatcgtaccggagaaattgtgatgaccatttcagatcaaaaagaaaatctttcggatccaatcggaggagactgctgggtagagaacggactttctatatcagaaaagcgctatcaatgggaaaaatcctttcaaaccgaatcgaaatggtattctggggattttcatacacatacaagactgtctgatggaaaagaaaccatagaacatgcgtctaaacgagcagaagagcgtggattggacttttatgtgccgacagaacataatttaatgcacacgggctggtgcaaaacatccttgtgtgtacttccgggaatcgaaattacaacagacaatgggcatatgaatctgtttggaattacagaaatgccggaaagaatactggaaatcgtaaaacataacggagagaatgtcatccatacttatatggagcagaccatagaagaagcgaagaaaaaagggtggcttcgcagcatcaaccatccgtttctgaccatctggaaatggcgatttgagaatactgacttgcgggatatcgactgcatggaaatcatcaacgaccccacctatccggacggacctgagtccaacgataaagccatccgctttttggatgaagtatggaacgcaggaattcgccttttcggagtgggaggaagtgattcccacaatctggaagaagaattgtatgagggggcagcgctgccttctgcagtgggggatccggcaacctgggtattttgcgagggattaagtccacgaaatctgatgcagtcagttgagcagggacatatgtgtgtgaccagattctgcagaatagaaccaaggattgaagtggatggaaaacgctaccttcctggagataaacttccgaatcaaaagtgtgagattctgtatcaggcagatgtgtcaggactgatcgaagaaccggaaatttttcttgtgatgaatggaaattatgtggcacttccagttgaacggttggaagatgggacgtatcaggtaaaagcacatttgatcctggaagaagccgcatggcagtggatccgactggaagtccgcacaaaaaaacaggaatttctgggctttgtaaatccggtatccaggggaagaaaagagccggaacaaacaacgtttggagaaatcgtaaaaaaattagaaggttgacatagatgataaaaggtattttatttgataaagatggaacattgattgattttttttccttatggctgggagcggcaaatacagtagtgaagcagcttttacaggaaaatcagcttcccggggatatgcaggactgtgtcctgaaagcgatgggagtagaagatggaaaaattgatccgtatgggggtctggcatataagtcatatggggaaattgcagaagatattacaaatgcacttgcggaacaacagatttgtctggactgtgaaaagatgaaaatgcagctggagaagttgtttggcggatatgtaatggaaaaccaggtgcagtatgtggaaacagcagatatcaaagcagttctggatgttttgaagcaaagaaatatacgaatcggacttgcaacggcagatacagtggcatccgcaaagaattgtctgacacggctgggagtactggaaaaatttgattatataggagcagatgataaagtgctgcgtcctaagccagaggcggatatgtttctggaatttcagagaaaatttggtttacagccatatgaaatcgcagtggtaggggatacctataatgatattcgatttgcaagagaaaatggcggtattgcaattggcgttttaagtggagtgagtcgggcaaaagattttgctgaagaagcggattatattttgcagtctgtggaagaacttccacgattactggaacagatataaaaaggaaggaggcattgctgtggctgagattcagttgaaacatgtatataaaaaatatgaagaccaagtggttgcggtccgggattttaatctggagatcaaagatcaggaatttgtcatttttgtaggtccttccggatgtggaaagtcgacaactttgagaatgatcgcagggctggaggagatatctgacggaaagctgctgatcgatggaagaatgatgaatcaggtacagtcatgtgaccgggatattgccatggtatttcaaaattatgcgttatatcctcatatgacagtatttgaaaatatggcatacagccttcggctgaaaaaagtaccgaaaaaagaacgcagacagaaagtagaggaagtggcaaagatactgggactggaagaagtgctggatcgaaaaccgggcgagctatccggagggcagaagcaaagagtggcaatgggacgggcaattgtacgaaatcccagaatctttcttatggatgaaccactgtctaatctggatgcaaaactgagaacacagatgagggcggagatattaaaactctatcagaagctgaaaacaacctttatttacgtgacacatgatcagactgaggcaatgacactcggcaccaaaatcgtggtgatgaaagatggcgtgattcagcaggtcgcatctccggaagaactttataattgtccggcaaatacatttgtggcaggctttatcggaatgccgccgatgaatttctttcggggaaaatgctgccggggcggagaacatggaatgtatcttcagatgggaggattttcggtggatctgacagaagaagatgcaaaaagagcgttacagaaaggatacatgggggaggagattacagttggtgtcaggccggaagatctggtgcctgcagaggaaggaacaaagcatgaaatcttagtctatgaaatgctgggtgcacagacatatctctactttgcgtttgaaggaaaggacgtagcactgcagaccgatgcagatacaccgtatcggagaggggatcggatttcttttactcttagaagagaaaaactacatttgtttgataaagatacaggaatcaggatataggaaaacagcggaagtatttctgctgtttttctttgtctgtacagtcagaaaaaaaagaagtgagaaatgttttggggtatatcttacatcaaaattatgctatactgaaacagtaaccagaagaaattcaaaaaaagacagcaggtgatgatatgagcagttttaaagacgtagttggacataaaaatataatacagtacattgaaaatgcagtaaaaacagacaaagtttcccatgcatatattttaaacggggaaaaaggttccggaaaacgacttctggcaaatctgttcgctatgagcctgcagtgtcagaatcgggatgaagatggagatgcatgcggcaagtgtcagtcctgtaagcaggcagcgtccaataatcagccggatatcatcaaggtgacgcacgaaaagccgaataccatcagtatcgatgatatcagagagcagatcaacaatgatattgtgatcaagccgtacagtagtaaatataagatttatattgtaccggatgcggatatgatgagtgtgcaggcacagaatgcactgttaaagacgattgaggaaccgccggcatatgcggtgattttacttttgacagagaacgcagagattcttcttccgacgatccgttccagatgtgtgatgctgaaattgagaaacatcaaagatcagctgatcaaaaagtatctgatggaacagatggagattccggattataaggcagatgtgtgtgtagcatttgcacagggcaatatggggagagcaattatgcttgcaacatccgagcatttcaatgagatcaaagaagaggcagtccatcttctgcgggagatcaatgatatggatgtggatgggctggaggcagcagtaaagcgtgtggtttcttataagatgaatatcacggattatctggatgtgctttccgtgtggtatcgggatgtcctgatctataaagccacaaagaatgtggatcaggttgtattttcagatcagctccgctacatcaaagagcgggcaagcaagagctcttatgaaggaatcgagaatattctggatggcatcgaaaaggcaaaggccagattaaaagcaaatgtcaattttgagctgacaatggaattgcttttattgacaataaaggagaactaataggatgacaaaagtgattggagtaaggtttcggacagccggaaagatttactatttttcaccgggaaagtttgaaatcaaacagggtgaccatgtgatcgtggaaacggcgcgtgggatagagtacggaaaagttgtgatcggaaccagaaaagtaaaagatgaagaggtggtacagccgttaaaatctgtcattcggatcgctacagaacaggatcataagacagaagaaaagaacagagaaaaagaaaaagaggcatttcagatttgtctggaaaagatcagaaaacatggtctggagatgaaactgatcgatgcagaatatacatttgataacaataaagtattattttattttactgccgatggacgaattgatttccgtgagttggtaaaagatctggcagcagtttttcgaatccggatcgaactgcggcagatcggagtgagagatgagacgaagatccggggcggaatcggaatctgtggaaggccgttgtgctgccacacatatttgtctgaatttgcagccgtttcaatcaagatggcaaaagagcagaatctgtccttgaatccgacaaagatttccggggtgtgcggcagattgatgtgttgtctgacgaatgaggaagagacgtacgaagaactcaacagccagcttccgtctgtcggagacaatgttaccacatcagacggcttgacaggaacggttcattctctaagtgtactgagaaaactggtgaaagtagtcgtcaatctggaaaatgatgaaaaagaaattcgggaatatcatgccgaggaattgaaattccgtccgcgtaagcgaaaagcaaaagtatcgaaagaagagatgcgtaagctggcagaattggaaaaaggagaaggagcgtccagattagatgacaaataatttaaaaaccggagaacgtctggatgatctgcagcttaacgggcttcagatcattcaggatccgggacggttttgttttgggattgatgcggtgctgctttctgattttgcaaaagtcaaacagggagagacggttctggatttgggtaccggaaccggaatcctaccgattctgctgtctgcgaagacacagggagggcattttaccggactggagattcagaaagaaagtgcggatatggcacgaagaagtgtggagatcaatcagcttcagaagaaaatcgagattgtgcagggagatatcaaagaggcggcagcaacattcaagccgactttttttgatgtgatcgtaacgaatccaccgtatatgctgaatcagcatgggctgcagaatccgggggatgcaaaagcaatcgcacgacatgagattttatgtacgctggatgatatcctgagagagagcaaacagcttctggctgatggaaaaggacgattttatatgatccataaaccatttcgtctggctgaaatcctgacgaagatgagtgcatacaggattgagccgaagcgcattcagtttgtgcatccttatattgacaaggagcccacgatggtgctcatcgaaggcttgcggggaggaaagtcccgtgtgacggttgaaccgccgatcatcatgtattctcactgatgagataagagaaaggaagaggcatggcaggaacattatatttgtgtgcgactccgattggaaatctggaagatatgacctttcgcgtgatccgtacactcaaagaagtagatctgatcgcagcggaggatacaagaaacagtatcaagttgttgaatcattttgagatacagacgccgatgaccagttaccacgaatacaataagtatgaaaaaggccggaaactggtggaaaagctgcaggaaggaatgaatattgctctgatcacagatgcagggacaccgggaatttccgatccgggagaagaattggtgaaaatgtgttatgaggctggcatttctgtgacctctcttcctggagcagcagcttgtatcacggcattgacaatttcaggattatcaaccaggagattcgcatttgaagcatttcttccctctgataaaaaagagcgtgaacagattttgagggaattagagacagagacgcgaacgatgattctctatgaagcaccccatcgtctggtcaagacgttaaagctgcttctggaacatcttggaaaccgaaaaattacggtgtgcagagagctgacaaaacgtcatgaaacagcatttgcagcgactttggaggaggcagttgcccattatgaggcaaatgctccaaagggggaatgtgttctggtgctggaaggaaagagccgggagcagatgcaggaagaggagagaaagcagtgggaagagatgaccattgaagaccacatggaagtatatttgaaacagggaatggataaaaaatcggcaatgaaagctgttgcaaaagaccgtggtgtgtcgaagcgggagatttatcaatatcttgaaagcgggaaataaaaaggaacacaggaatccagcaattggatgcctgtgttccttttttgtgaagaagaaaattagaatcagatctttttactgtctacaatctctccgtctttcatgaagatgactttttgtcccgggatattcgtttcttccggcttgtttgttacatagagaaccgtaatgccaagctccttgttgatacggcggatatcgcgcagcatctcgtgtcttcggtgttcgttctgccgtgcaaaatcttcatctacgagaagtacctttggtttgcatacaacagcacgtccaagagcgacccgttgcttttgagcttccttgatcacccgaatctttttctcaagaatatcggtgatgttgaaaaaatgtgctgccatttttacgcggctgtcaatgatctggcgcggaaggttgcgaagacgaagccccagtgcaatgttatcatagacgtttaaatgagaatagagctgataattctgaaacgccatggcaagactgcggtctcgaggaagaatatcattgagcagatctttccccagataaatttctccggatgtaatgtcttccatgccaccgatcatccgcaataccgtggactttccgcagccactcggtccgtaaaatgtaacaaactctccgtcttctatatacaaagagaaatttttcactgatacaaacccattgggatatgttttgttcagattttcaagagtaatacttgccatcggaacacctccttatgtctaatatcagtgtaccatattcgaactggcaaaacaatctattgcagcatgaattgagccagaacaacgctggcagcaagtccggcaaaagtagcaatcagggcacctgccagtgtataacgggagtttttgattttggcagtcataaaataaatactcatcgtgtaaaaaattgtttccgtacacgacatggagatcgatgcaatgagtccgatcagagaatctgtaccaaattctttatagagatccagaagaagtccggctgcggcagaggacgaaaacatttttacaacggtaagaggaaccagttctccgggaaatccaattgcagacgtaaactgaccaatgcaggaagaaagcatttccagaaatccagaagcacgcagaattcccacagcaaccataagtccaatcaaggtgggcatgatcttgatgacagtcagaaatccgctgcgggcgcctttgataaaatgttcatagacattcgttttcatgaggagtccgtagacaatgatcgccaggattaaaaatggaacaataaaatttgtaagataaagaaaaagattcatggatcgctccaaaataaattcggatttttaaatctatatgcagtttgaaagaataacatcccttcagaattcataagatgaaacaaaatccacagatggagtttgcgatgtcaaagtgttcgaaaaagagccggaacaggcaagtcatctcattcattcttgtatttgcattgctggtgtctgtgatattgtcaggatgtcatggacagtctgcagaaatccagaataaaaaattcagaaaatttacagaaacgttgttttgtcaggaagtgtcatccaatgcagtcagtctgcattacaccttaaaaaatccggatcagtatgggattacagactccccggtcacatttggatattttagtacggatccgggagaacgaaaaattacaacagagaatacccaggcggcattgaaacgattttcttatcaaaagctgtcaaaacaaaaccaacttacatatgatgttttgaattattatctggaattgtccaaaaaagaaagcgaatatcttctgtatgaagagccaatggggacagttagtggcgtccagacgcagattccggtgctgctgtcggaatatcagcttcataagaaagcagatgtagatgcatatctggagctgatgaaaacaactccggaatatttcaattctctgattgcatttgaacaggaaaaggcacaaaaaggtttgtttatggcaagttatatcgccgatgccgtgatcgaacaatgccaggcatttcttgatatgggaaattccaattatctgatttctacatttgtggatcggatccagaaactgacggatctgtccgaagaggaaaaaagtgactatatccagaaaaatgcctatatgctgcaaacctatgtattgccagcatatcagcagttgatcaaaacggtagtagaattgaaggaatccggaaaaaatgaaggcggactgtgttatcttccgaatggaaaagaatattatgaattgacagtccaggcatctacaggatccgcaagaaccgttccggaactgcaaaagctgacccggcagcagatcgaggatgatcttgcggcaatgaaagcagtggttggtctgacatcagagcaggcgaaggaaacagctgtgatggattcttcagatccaaaagaaattttaaatagtctgagtgtggatattcagaaaacatttccggaacttccgcagacgagtgtggaggtaaagtacgttccagaagcaatggaagcccatttaagtccggcattttatatgataccggcattggatgataccgaaaaaaatgtgatctatgtcaacaaagcacatatggacaataaattgacattgtatacgacacttgcccatgaaggatatccgggtcatctgtatcagacagtctattatgcatctaccaatccggatccgctgcgaagtatcttcaattttggaggatatgtggagggatgggcaacctatgcagaaatgggatcctactatctggcagattctttgaccagagaacaggcaatcctgcttcagaaaaacagttccatccttctggcgttgtatgcactggctgacatgggaatccattatgatgggtggaatcggatggatgcggtcaaatttttcaaacagtatggtgtgggaagtgcagagattgtgaatcagatttatgatctgatcatcggttccccgggaaattacctgaaatactacatcggatatgtagagttcctggaattaaagaaaaaatgggtggaacaaaaaggtgcggaattttcacagaaagaatttcacaaggcagttctggatgtaggtccggcgccgtttgaaatcgtagaaaaatatatgtggcagggggaatcgtaatatgttgaatgggctgtgggcagggatgatcatcattggaattgtatatggtgcatttacaggcaaaatgccggatattaccaatgcggctctggagtcagcaaaagaagcagtgaccttgtgtattaccatggtgggagtgatggcattttggatgggaattatggaaattgcatccagatcagggattattgagatggcatcgaagaaaatgaggccgctgatccgatttttgtttccggggattccaaaagaacacccggcgaatcagtatattacaacaaattttattgcaaattttctgggacttggatgggcggcaacgcctgccggtctgcagggcatgcaggcactggcagaactggaacaggaacggaggctgaaacgggcgccgggaaaggcgagacagccgggagtcgcctccaatgaaatgtgtacatttctgatcatgaatatctcttctctgcagttgatcccgatccatgtgatcgcctaccggagccagtatggaagtgtgaatccggccgcaatcgtaggtgcgggaattgtggctacaacggtgagtacactggcagggatggtgtattgtaaggtcatggacaggacgaaatgagtcctgttcgggcatattccatcaattcttcttccacctgtttcatcaattcttttgtctcaggatttgtatatggaatccgtgcaatgatccttggaatatagttctgctcttcaatgatatccagactttcccggaaattgatatcatagaaataagcaagataagaaatccagtaatccatgagagtcactctgtcagaggaaagaatacattcgtgccgtaaaatagaatctctgacctttggagaaacaaaagaggcaccggtctcttctgcggaagcgttcataaaagtttccaggcggtcttccagctttacgcggcagttatccagtttatcggcatcccggataatctttgcatgaagtaaagtacgcgcatcagaaataccttccagtttaaaatcgctgtgttttgcaatagaaatacggatgatattgtcaaaatcagactccggaacgaatctgcggatcaggtcttctccctcatcgttgtcaaacaaaatcttcacgccataggcagcatgatccatagtatccggaagaaagctgtcgaagcgctttaactgctcaaagcgaccgatatcgtgcagcagtgcgatcagcctggcgagagccgcatcctcttccgataattgcatacgggcagcaatgtcggcactttcttttacaactccataggtatgtacaattttcagacgaattttgtcattgtggcagtcgtagtcttttaaataaaagttgaattgttttcgggcagtatcataatccatgaaatccacattctcctcactttttgaaatgttctgtacaaagtctaacactggaaaaatcagatgtccaatgaaaattttataaaaaacagaaggacttcgtgttataataatacagacacaaataaatgagatacggagagaattatgcagttacgatacgagatcccggatacattctggagtttattccgctcagtaaaccgggagatttatatggagtcgctgctggtgatcaatgaggaatatcagtacagtaattattttctgacgaaagaaatctgtgtgcaggtattaagtgatatgaatgcacaaaagaggatttctctggagcgagaagagaacgagacggattttgatatgttggagacaacagcgtcccgtattttacggtggcttttaaaaaccggatggctgaagaagatcgaagattacagtacgatggtgacgaatattgtgataccggattatgcggcggtttttattgaggcgtttgagcgtctaacatcggaagaactggaagaaacggaactctatattcagaatgtatatgccacgctattttcatttcagaatgattccagagtcaatttgaatatgcttcgaactgcgctgatcaacacaagaaagttgaacaaagcgttacaggatatgctgcataacatggacaaattttttgagcggcttttggatcaggagtcttatggggagcttctgcgggaacatctggatgggtatgtggaagaaatcgttaagaaaaaataccatattctgaaaacatccgataacttctatatctacaaaatggatatcaaaaaatgtctccgggatatgcgggaaaatgaagaatggatcgaaaaaatccggcagaaagccaaagccgcaggagatacaaaagaagacgtactggaacttttagatctcatcgagcgtggatttgatgacattgaacaccgaattgcaaatatggacagagagcattctaaatatgtgcgggcaactgtgagccggatgaattatctgctcagtggagagaccgataccaagggccttgttgtgcagcttttgaacagaatttctgcccaggaagatcccgaaagactgctgacagaaaccggaaagcggatgaatctgtcattgtttgagatgatttctgaaaaatcattgtacaaaagaagaaaaccaaaagcagattttatcagtcagatgggacaggatgaagaatatgaagatctgaaccgggaggatgtgctgaaattaaatcggattcagatgcgctacagcaaacaggaaattgaggatttcattgagtctcatatggaaaatgaagtaatggatgtcggaacacttcatatcacagaggagaccgcatttgaaaaactgatcctggcgtacgattacagtaccagaaagaatagtaaataccgggtattgaatgaagaagaaacggtcattcaaaacggaaaatatcaatatccggcgttaaaatttgtgcgaaggagaccgcaatgatcgaatattacgaacagctttcagaagaagagcaggaggatatcaaaactgtgatccagacattgtatcgacagacatttcttctggagcgaaaatttgaaaaacggaccgggcgtatggttcctgtcagagaatatcgggtatgcagcaaacataaggaatttctggaagcatattttgcaatttcaggaatcacactgcaggaaaatgtacatatgggcatgatgtatatccagggtgaaactctttggggagaaaaactctccagacttgcaacaatctatattctcgtattaaagctgatctatgatgagcagatggcagctgtgtcatccagcagtcatattgtaacgacgcttggtgcagtgaatggaaaagcgggagaatttcacgtattaaacggtctgccctctccaacagaaatgcgcaggaccatcacatttttaaaaaaatatcagattgtagaaccattggatgtcatggaagaactggatgaggacagcagactggtcatttatccgtgcatccatgcggtactgctgggagacgatatcagagaactattagagacattcagtgaggaggaacacattggagacaaaacaggcgttcaaagcgctctcgaaaatctgcctgaataactggcattacatagaccggaaaatattgcatttgaatcagggcatcaatttctttaccggacactccggaagtggaaagtcaacggtgatcgatgccatgcagatcgtattatatgcgaatacagacggaagaggattttttaacaaggctgcagcggatgattcggaccgtacactgatcgaatatttgagaggaatggtgaacatcggggaaaacaatgaatctcagtatttacggaatcagaatttttcaagtaccattgttttggagttggagcagacagacacaaaagaaaaacagtgtataggagttgtctttgacgttgagacagcgaccaatgagatcaaccgcctgtttttctggcataagggcggacttctggcaaatcagtaccgtgcagacaagcgctgtctgacaacatttgaagtgaaagaatatctgcagcggacattttcaaaggaagaatactactgtggaccaagcaatgaaagatttcgcagacaaatgtacgatctttatctgggcggactggatatcgaaaaatttccgcgcctgttcaagcgtgcgatcccattccgtatgaatattaagttggaagattttgtgaaagaatatatctgtatggagcaggacatgcatattgaagagctgcaggaaagcgtcatgcagtacggaaggatgcgcagcaaaatcgaagaaactctggaagagatccggtatctgcaggacatccaaaattcctatcagcagtatgaagaaaaacaggaggaagcagcatcctgcagctatcagattgcgaagctggaaatcttacatttgcagagcaaaattcaggagctgaatgaccggataaaagaaacacagtcagaaatcaaaggacaggagacaaagagagcagatctggaaaaagaacaggaaatgctgcaaaaagaatacgaagcagtgctcctgaaaatcgcagacagtggatatgcagctctggaaaaagatctggaaagcctgaacgagacactggagcgtctgcaaaacagcaaagcacggtggaaaaaaacagcagatggattgaaagtgtggaaaaccaaagatgtgacatcaaatcagacaatctgggatattgaccggtttgtttcggaaaagatcacggaaggagagctggaacggcttcagacgagtctgatacagatccgggaagaactggaagaagaacgtcaggagacagatgccagacttcgtgcggtgaaaaaagaagagaaagcggcgagggaagaattaaaagaactgaaacaggggagaaaagcttatccaaaagagttggaagaagccagatatgagttgagaaaccgactgtatgagaagtgcggcaagtttgtcaatgtgcagattctggcagatcttctggatgtacgggacgagcgttggcacaatgcgatcgagggatatctcggaaacaataaactgcttctggtcgtagaaccaaagtatgcaaaagctgcgatggaaatctatcaggatatggacaagaaaaaattcttccgggcagcagttctggataccgaaaaagtgcaggagacttcgtgggaagtaaaagaaggggcactggcacaggagctgatcgcgaaagaatcgtatgtgcaggcatatatcaacttcttcctcggaaatgtcatcaagtgtgagactgtcgaagaacttcgtcagaacaggatcggaatcacggcagattgcgtgttgtatcatagcttccgtctgcagcatatcaatccggaaaattatacaagaagggcatatatcggagagaccagtatgcgccagaggattcagcgcctggaacaaaagtgtgagagtcttcaaaaagaacgtcttccgctgcaggaaatgttggaagagatccgaagaatttctcaactggaaggactgacacagcctttggaggactatagacaatggctgtctgatctgcataaaattccggaaaaagagaaagaaaaagcacgtcttgtagatgcgatgcagaaactcagagaagaatctgttctgatatgggagcagcagaagcaggaaatccagcaaaaacaggaagtcaaaaaggcagagattgaaagcgttcagaaagcaatctggaatcatcaggaaaacggaaagcggtttcagaatcttctggtcgatttcaatgagcagctgctgcagaaagagacggaatcccggcagcaggatcctgaaaaatatgaagcggaatttcaggcatatctggagggcagacagagtcgaaattatgaatatctgatgcgggaacgcatcaagaaaaaacagccattggaagatgcgcaggaacaggcatatgaaaaactggtagaagcaaggagtgcgtatcttcgaaaatatccgaacaggacctattctgcaacgatccgtgacaatgatgtgtacgaaaagcagctttcaaatcttgagtgcgataacctggaaaaatacagggaagaggcacaggaacaggcgagagctgcagtggaacactttaaagttgattttgtatccaagatccgttatgcaatcaaagaggcatatcagaaaaaagacgaattgaaccggatcatcagccgtctggattttggaaaggataagtatcagtttgtcatcacgaaaaacaaaggtccggacggacgattttatcgcatgtttatggatgacgcattggatatcaatccgtctcagttgagtgatcacatggaaaatcagatgaacttgtttaccatggagcatgaggaagaatacggagatctgatgaatgagctgatcgagatttttattccaccggaaaatgccacaagggaagaaatggaagaagccagaaaaaatatggacaagtatgcagattatcggacgtatctctcctttgatatgcagcagatcgtacagggagaaaaggatatgcggatcgggctgagcaagatgatcaagaaaaattccggaggagaagggcagaacccgctttacattgcgcttctggcgagttttgcacagatttaccggatcaatctgtccccgaagatcaagcgtccgccgacactgcgtctggttgtattggatgaagccttttccaaaatggatgcagagaaagtggcaagctgcatttctctgatccgtggactgggattccaggcgatcatcagtgcgaccaatgacaagatccagaactatctggaaaatgtagataagacctttgtctatgcaaatccgaataaaaaacatatttccattcaggaatttgagcgtgtggagtttgaacaactgcagggagaagagtgatgacatggatcttggaacatatcgtaaaacagattgaatccgggacagaaagctggcgggcagaaagtcagggcgggaaaagtctgtccaatgaacacggagaactttatgataaaaaacatttaaaatccgatgtggtgcaggaagcaattgagcttcaaagcagaaatttgattcagattgactgggtaaaaggatatcggggcagtgatattgagcgtattcgttacaggctggaagaaaaagctgtattttatacattatatcaacaggaagtcgatgcaggctttctgccaaaacaggaaaagatccgattgtatcaggaatttttaaaacatcagttatcaaaagtcaaaaagaaatggattcgggagtattatgaagatcttctgaaacgttcagagaataagagaaagacagatattttcgaactgctgaaccaggagaaaaaatacgctccctgttttgttggattggatgaaatcgaagagtccatatttaagcggattttcagcaaaaaatatctggggaacacaaaaacgtttgaaaaagaaatggaagggcatatcatcagtgctgccaaaaatttctgtccggatgtagaaaaagaaatggatgatacgaccgtattgcagcagttgtttattgaagaatatgcacaggagttatctttaaagggggaattacattttcggatcaaagaagaaaatggaaattttcaggagattgataccggatgttattgttttggtactacattgaacagtcagactttggaacacgcagtgctggatcaggagcagaagattcagaagatcgtgatatttgagaacaaagcaaattatatttcagcaccttataaagcaggcgttttatatgtattcagtcatggatatttttcaccgaaagaatgcagatttttaaaggaattgtatcaggtgttaaagaataaacaggttcaatattttcacagcggagatctggattatggcgggatcaaaatttttcagtatattcgtaagacgatttttccggaattggaaccacttcagatggatgttcacacatatgagacttatcaggagtttgcagaagaaatagaagcagaaccactggaaaaattaaaacaggttcaggatgaaaatcctcagatacaagaactgatcagaaaactgttggagacaggaaaaggaatggaacaagagtgttttttaatagagaaaagaggaaatcacacatgaaattaatgattgcatctgatattcatggttctgcatattactgcagaaaaatgatggaagcttatgactgggaacaggcagataagcttctgttgttaggcgatattttatatcatggcccaagaaatgatctgccgaaggagtatgccccaaaagaagtgatcgctatgttgaatgcaagaaaagaagagctcttgtgcgtcagaggaaattgtgatacagaagtggatcagatggttttggaatttccaattctggcagactactgctttttgaacctggatgggcagaacatctatgcaacacacggccacgtatggaatcctggaaatcttccgatgctgaaagcaggagacattctgctgaacggacatacacatattcccgcatgtgaaaagatttatacagaaaccggtcaggatgtcatgtatatgaatccgggatcggtgtcaattccaaaagaacattccgaacacagctatatggtctgcaaaaatggtgtgtttgaatggaaaaatttagagggagagggctatcaaagatggaagacagatacgcattactgattgatgcggataatgtgtcggcaaagtatatcaaaccgatactggatgaattatctaaatatggaaatgttacatataaacggatttacggggactggacgagtacttacaattccagctggaaggaagtactgcttcagaattccattacgccgatccagcagttcagctatactcacggcaagaatgcgacagattctgcaatgatcattgatgcgatggatatgttgtatacaagtgagttggagggattttgtctcgtttccagtgacagcgatttcacaaagctggcgagcagactgcgggaaagcggtaaaacggtcattggaatgggagaagataagacgccgccgccgtttcgaaaagcatgtgatatttttacggtgttggagctgctgttggaagacagtatgttggaaaagccggaaaaagctgcagcacatgcagcgatagaaaaagaaccgaaaaaagagtcgccaggtgcagtttccaagagccagattgaagaggcagtggtaaagattatcacggaaaaccagaacgatgataaagaaacaggtcttggagaggtcggaagccgcctggtcaagctgtatccggattttgatgtaagaagatatggatacagtctgttgtctaaatttctggagacatttccaaaattaaagctgatacaggatggaacaaaagtatcggtaacattgtttgaagataaaagtcagcaggagcggattgaagaatatatcatgtatcagttgaaacaggcaggcagccagggagtgtctctgggaactcttggaaataagattcgaaataaattcggaaatttcaaagtcagagactatggatattctcagtttcagcagtatatcaaaagttttccagatgtagatttaaaagatgacggagagcagaaatgggcagtgctgagaaggtagaacaaaacagtcgtgtgaaatcatgcggctgttttttttattctcttgacaaaactaaaaacatagtgtactatctaactatagcactgatacacagaacggaaggaggaagaaaatgaattacaatgcagagatgccgatctatctgcaggtcattcatgacttgaagaaaaagatgatccagggaaagatacttcccggagagaagcttccatccaacagagagctggcggttctctacaagatcaatcagaataccgcggcgagaatttacagagagatggagatacatggatattgttatacaaagagagggattggaacatttgtgatggaggaagagacgatgttcgagacgatcaaaaaagagatggcagaggaattattgagtaactttatgcatgagatgcaggatcttggattcgaaaaagacgatatcatttccaggatcgcagattataaggaggagagcagatgattttagaatgtcgtgacctgagtaaatcattttatacgaaaagagcactggatgaggtttctttaaaactggagagcggaaggatctacggcctgcttggggagaatggaagtggaaagactacctggatgaagattatttccggtctgacaaagcccacatccggggaagttttcttcaaggagcatccgtggttttatggagataaggctgagattgcctacatgtcaacagagccgtttttctacagctttctggatgtggatggcgtagggcagtactacaaagatttcttcccggattttgacgagaagaagtttcatgagatggtaaaaaagatgtctctggaagggaagatgaaagtcaaagaactgtccaccggtatgacggcaaaattaaaagtgatcgcaacgctgagccgaaaggcagagctgtaccttttagatgagccgtttaacgggattgattataaagccaaagaagagatcctcggactgatcctggaaacagcgaacgagcacaatacatttgtcatttccacgcatatgatcgatgagatcgagagctttatcgaagaagcgatctttatcaaaaacggagaagtgatacggcagatctccgtggaggaagagcgtatggagagcggcaagtcggtggcagacatttatctggagatcatgtaaagagttggaaaagaaggagaaaagagaaagagaggaaacgaaatgggacgtttgatcaaatatgagctgaaaaaacagcagacatccagaaatatcatactggcgctgcttctggtatttttactggcatttgcggcaggaattttttcagacaatggaaatatggtaggaatcagtgtaggactggagctttttgtcggaatgtttgtctttttttatatgggtgttgaaagtcttttgattttaaaccgggatctgaagacaaagcagagtcacatgctctggatggtgccgatgccaagctggaagatccttggggcaaaatacatcgcagcagttttgcagatcttctgtatttcagcagcatatgtgctggctggtgcagcgtgcgtcatgacgatgatcgcaaaagagggagcctggaaagagcttatgcaggcaatccgtatgggatttgagtggctgtttcagggcaacctggactgggtaaccgttctggcaatcttcctgtttttctttctggcatggacatctgtgatcgcaaccggatttctggcaattatcgtatccagaacggtattgatcaattccagatttgcagggattgtttctttgatcctgttcttcgtgatcaacggaattgtggagtatgtttataacctgtttgcaagatacgaggttctgggaatccacaaaggactttatatcggaatcgcagaatacggattctatattgtagtatgtgttgggttgtttgccatatccagcgtgttggcagaaaagaaattaagtgtgtaaaagacagagatgcagtcaaaaagaaaagactgtgtctctttttttatacagagaatcattgacaactgtcttgtcacatgtaaagtcttgtgctataatggtcagcaattaacgataaaaaattaacaattcaggataagtgagggaatacaagatgacaattgtggaagaaatccagaaattgaagcaagaaaaaaatgcagtcattctggcacattattatgtaagaccggagattcaggaaattgcggactatatcggagattcattttatctgagcaaagtggcagttggactaaaagaacagaccatcgtattctgtggcgtttcttttatgggagagagtgcgaaggtactgaacccggagaaaaccgtattgatgccggatatgcatgcagattgtgcaatggcgcatatggcagatgcagatacgatccagaagatgcgcgatacatatgaagatctggcagtggtgtgttacatcaattctactgcagaattgaagacacattccgatgtatgtgtgacatctgccaatgcagtgaagatcgtaaaagaacttccgaacaagaatattttcttcattccggacagaaacctggcacattttgtggcagagcaggtaccggagaagaactttgtatacaacgaaggttattgcccgatccatgagaagatgcaggtggaagagatcaaaaaagcaaaggtacagcatccgaatgcagaagtattgtcccatccggaatgtccgaaagcagtgctggaaatttccgattatgtgggaagcacatccgggattatagattatgcagcaaaaagtgaaaacgaagaatttattatctgtacggaaaatggagtccgctacaaactggaaaaggacaacccgggcaagaagttttattttacagagacagagcctgtctgtacagatatgaagctgattacattagaaaaagtccttcacgtcttaaaaacaggagagaatgaagtgcatttgagtgaagcattgagaacggactccagaaagcctttggaaaaaatgctggagctggcaaaatagagagtctttttgaaaaaagagacctgccgaaaggaaagagagtattatgaagaaaaaagcagatgttgtcatcgttggaacgggtgtagcgggattgttttctgcgttgaatcttccggatgacaaagaaatcatcatgatcacgaaatcagatgccgagagcagtgactcatttctggcacagggcggaatctgtgtacttcgggatgagcaggattatgacagctattttgaagacacgatgcgggccggacattatgagaatcgaaaagaatccgtggatattatgatccgcagttccagagaaatcattgaagatctggtaagatatggtgtagaatttgaaaaggatggagagacgttcgcttatacaagagaaggggcacattccagaccaagaattctgttccatgaagatgtgactggaaaagagatcacaagcaagctgttggcgcgtgtgaaagagaagaaaaatgtgacgatctatgagtatacaacgatgacagatatcatggaagatcagggaaagtgtgtgggaattacagtgacagaacaagatggagaagcatcttccatatatgcagactatacggttctggcaagcggcggtataggagggctgtatcagcactctacgaatttcccgcatttgacaggagatgcactggaagtggcgaaaaagcatcacatccgtctggagcatctggattatgtacagatccatccgacgaccttgtattccgagaagccgggcagacgatttttgatttcagaatctgtccgcggagaaggtgcacttctctataacaaaaatatggagcggtttgtcgatgaactgcttccgagagatgtcgtgacgaaggctatacgggaacagatggaaaaagacggtacgaattttgtatggctgtctatggcgccgatcgagaaagagacgatattgagtcatttcccgaatatatacgaacactgcctggaagaagggtatgatgtgacgaaagaatgtatcccggtggttccggcacagcactattttatgggtggtatctgggtggataaaaacagccatacatcgatgccgaatctgtttgcagtgggagaaacaagctgcaacggcgtacatggagcgaaccgtctggcaagcaactctcttctggagagccttgtatttgccaaaagagcggcagcgctgatcaaagagcaatggtgtctggagaaagagcaggcagtataaaataagaatacaaaaacgaggagaaacattatgaatcagattacaatgaaacttcaggcagatcacctgattttagaagcattaaaagaagatatttccagtgaagacgtgacaaccaactctgtcatgaaagaggctgtggcaggagaagtagatctgatctgcaaacaggatggagtgattgcgggactggaagtatttgagcgagtgtttgcacttctggatccggatacaaaggtcgaattatactgcaaagacggagaggaagtaaaaaacggacagctcatgggaaaagtcaaaggagatattcgcgtccttctttccggagaacgtgttgccttgaactatctccagagaatgagcggaatcgcgacgtatacaaagtctgtggcaaaacttctggaaggaagcaagatcaaacttctggataccagaaaaacaacgccaaacatgcgcatttttgaaaagtatgcagttcgtgcaggaggcggatacaaccatcgttacaatctttctgacggtgtgttgttaaaagacaatcacatcggagcagcgggaagcgtgacaaaagcggttcagatggcaaaagaatatgcaccgtttgtcagaaaaattgaagtggaggtggagaatctggatatggtaaaagaagctgtggaggcaggagctgacattatcatgctggataacatgtcgcctgaagatatgaaaaaggcagtggaactgatcaatggaagagcggaaacggaatgctccggaaacgtgacaaaagaaaatatcgcacgtctgacagaaatcggggtggactatatttcaagtggtgcgctgacacattcggctccaatcctggatatttctttaaagaatctgcatgcagtagaataaggattcagaaaaagaaagagaggaacagtatttatgacgggttctgaacgcagaagtcaaatcatagatcagatcagaaacagcagcactccggtatccggggcacagcttgccagagaatttgatgtcagccgccaggtgatcgtgcaggatattgcactgatccgggcagcaggtcatgagatcatctctacaaacagaggttatcttttgaatacatctcattcggtgaaccggattttgaaagtcaaccatacggacgaagaattagaagatgagctgtgcacgattgtagatctgggcggaaaagtgatcaatgttatggtcaatcacagagtatacggtcacatggaggcagagatcaatattacctccagacggaaagtcatggaatttgtagaggacatcaaacggggaaaatcaagtcctttgaaaaatatcacatccaattatcattatcatctgatcgaggcagattccgaagagacactggacttgatcgaagaggcattgcggcagaaaaaatatctggtcgaagtgtcagccggataaaatcagaaggaaattcaggcggtccaaccttgacttctcattccggctgtgatacgattttcaacgagaaagcgtgtatggatacaccgatctgacagaatgaatatacggaaaatgcagagacggaagagagtaggttatcggaaattttacagagaattcccggaagatcctgagaggatcagatgctgagagggatgaacggaagataattgaacatggctcctgagcggcgcagcaagcatgtttgtgaactgcgatgggttcgccctttacagcgagagagtgtggagagcactcacagaggtttcagccgtgaggctgagataaatcagaagtggtaacacggtattgacccgtcttcttggcagcaggaaggcgggattttttatgaaggagagaagagagatggcagacaagaaaaagtattatattacaacagcgattgcctacacatctggcaaaccgcacattggaaacacgtacgagatcgttctggctgacgcaattgcgagatataagagaagtcagggatacgatgtgtttttccagacaggaacggacgaacacggtcagaagatcgagctcaaggcagaagaggcaggggtgacaccaaaagaatttgtagacagtgtttccggtgagatcaaaaaaatctgggatctgatggatacatcttatgataaattcattcgtacaactgatgaagatcacgaaaaacaggtacagaagattttcaaaaaactgtatgatcagggagatatttacaaaggacactacgaaggaatgtactgcactccatgtgagtctttctttacagagtcacagctggtagatggaaaatgtccggattgcggacgtgaagtacagccggcaaaagaggaagcatacttcttcaaaatgagcaaatatgcagacagactgatcgagcatattaacacacatccggagttcattcagccggtatcccgcaaaaatgagatgatgaacaacttcctgcttccgggacttcaggatctgtgtgtatccagaacatccttcaaatggggaattccggtagactttgatccaaaacatgttacttatgtatggctggatgcactgacaaactacatcacaggaattggatacgattgtgatggaaacagtacagagcagttcgagcaattgtggccggcagatctgcatctgatcggaaaagatatcatccgtttccatacgatttactggccaatcttcctgatggcgctggatcttccgcttccaaaacaggtatttggacatccatggctgctccagggtgacggaaaaatgagtaaatccaaaggaaacgtgctctatgcagatgaactggtagatttcttcggtgttgatgcagttcgttattttgtcctgcacgagatgccgtttgaaaatgacggagtgatcacatgggaactgatggtagagcgcatgaattctgatcttgcaaatacacttggaaatctggtaaacagaaccgtttctatgacgaataaatacttcggcggaattgtaacagacaaaggtgtggcagaagaagttgatgcagatctgaaggctgtgacagaaaatacaccaaaagcagtagaagccaaaatggaaggtctgcgtgtggcagatgctatcacagaaatcttcaatcttttcaaacgctgcaataaatacattgatgaaacaatgccttgggtacttgcaaaagaggaggcaaaaaaagaccgtctggaaacagtactgtggaatttgatccagagcatttcccgcggggcagagcttttggaatcgtttatgccttctacaagcaagaagattctggaacagcttggaaatggtcatgtcacagaaaaaccggaaatcctgtttgcaagactggatctggaagaggtcctgaaaaaagtagaagagctgcacccaccggttgtagaggaaaaagaagcagaagatgtgatcgatatcgaagcaaaacaggagattacatttgatgattttggaaaaatgcagttccaggtaggagagatcattgcctgtgaagaagtgaaaaaatccagaaagcttctttgctcacaggtaaagatcggaagccaggtaaaacagatcgtatccggaatcaaaggacactatacagccgaagaaatggttggaaagaaagtgatggttctcgtgaatctgaaacctgcaaaactggcaggtgtattatcagaaggaatgttgttatgcgcagaagatgcagagggcaatcttgcactgatgacaccggaaaaatcaatgccggcaggagcagaaatctgttaagaaaataaagaaaatgcgagaaaatcccccggatgcaagatggaaaagttttgtatctgggggatgtgttttgcagaaattatttagcctcttcaatccattgctttacaacttcaacatcaaccccggtcagctgagcaatctgcgcaggggagttgccggattgaagcatatgaagaacaatctctttttgtccaagattaatgccctcctcaagtccttcttcatataaatctttctcataagccttttgattaaacgatgtcagaaccatactgattacctccgctttatgcttcaccagtacatcccgaagaatacctttttcaatgcaaatatcaactgcttttgtaactgcgtacctcagatcatttgtttccttacactggatccttacagtatctacaaaaatagaatactctttcagacgctggcatttttccatcagagcaaggttatgtccgtaattgatattcagcatcactgcagtgcactgaagacaaggctgccgattatcggatacagattcaaatgcatctgtcaattgaagcgtcgtctcatccggttgttcctttgtgccgttatagaacacaaagtattgaggagtcggcagctttttcaaagtattgctgtataaattgatgttttccgtctcaacgtatccatcatacaatctggcgagatagatcagtccgcgcagtggcatgttgggattatacgtgctctgatgctcgtagagattcagtgtccctccgatcaggaaggaaatatcatttttcatggatagataaacagcgtcctccagtgtattcacttccagattgtttggattttcatagcaggtgttattcaacgcattgtataggtccaaaagatccttcttgttgctgaaaaccagacgaaaaagccgatccttatatttgcgattcgtgacagggtgtttctggtgattcctttttttgttttttctcatgtactttcctccattataaaaaacttatcctgtagatgcaatcttcttatttttgtgtttggttaaaaaactgaaaatctggcgaaacgccggaaaaaagacagcttccaattgatagaagccggtgctgtacagacgacagctaaaaagtaaattcattatatctgtatctgcatacaatcgcaatgcgcagattatacaaaataaatattcagaaaattcaaacaaaaaagaacagtttaaaaattattaaaggaaaatataaaaaatgtattgacaaataagagccgtggtgatattattaagtcaatccaaaagagatacaacaatcaaacatctcaaaaggatatttaactaaagaatgattcttaattcgtaagatatcattctattagattaaaaataaatgagttaaggaggcagaggtccaatggacagtatatcatcagttacatatcaatatgttagtggtacggtagatgcaggttcctgtaaaagagacctttaccacaatagataagatccagtaaaagtgaatgaaaagataaaatcgaagagattgtaaagctggatgaaaatcaaaagattcaacatctacagacgtattgaatatagataccacacttagccaaagttccagaacatgtgtaaagaaacatggataaggaatatcagttttatatgaagcaccatcagttatagaacgaataatcaaataggttgttggaatatcgatagaagatactgcagtagccgaacggttatagagaaaataactgaagaaagggctctcatgataggatgataccgataccgaatcggatttaggttatagatattgttaaattgaagaacaggaggtttcatataagccagtcttaatgaacagactgctatatcaattaacaagtgtaaaggtcttacaggaacagaatcgagatagttccttcgatttataaaataaaatatgaaaaatttaaatacaatataaaatgcatcttcaatgtcaattgagggtgcatttttttgacattacgggagtcatatggtaaactagaacaaactgggcaataaaatagaagtatccgtaagatacagattaagtataatgaggtgagcatagtggacaagtatgaatataagttgaagacagaacagatgctaaaacttatggaaaaaggtgcatacaacagagccgctgagattgctgacagtattgagtggaaacgtgtcagaaatgtaaacatgctgttgaatgtcagcaatatatatgagaagatccgagactaccggaaaagttttggtgttctgaaggttgcttatcacagaacagagggaagtagaaagatattatatcgcttgtgcactcttgcgataaagatgggaagtctggaagaagcgatcgactattatgatgagttcgtacaggctgcaccaaaggatccgaatcagtatattttaaaatatcgtttgttgagatccagaagagcttcgatcgatcagcagatccgtgcattggaacagtttaagaaagcagagtatgtagaagagtgggcatatgagctggcaaagagatacgaagaagcggggatgactgcggagtgtctggaagaatgtgatgatctgatcctctggttcagtgagggcaagtatgtttacaaagcgatggagctgaagatgaaatacaagccactgactccactgcagcaggaaaagtatgacagacggctggaagaaaacgcagattctttagagagagatacagaaaaactgatcgatctgggcaagataaaagcagaggaagaagaaaagcgaagaagagaacaagaagaagctgcacgttatacggaagacacactggagcatttagaatctgtcccggagcagacacaggctgaactcagcgaggaagaagtgagtgagcagctgagaaaagcagagcctccgaagaagctggggaatacgatgaagcttggtgaggcactccagaatctgttccaggcagaaaaagaagagccggaagagatggaacttttcgaagaggatgcagaagagtacgaagagatgacggagatacccactgcagacacagaagaagcagagaaagaagatgcagaggaagatatagaagaagatgaattcgcagatttggcagagtcactggaagagatcgaagcgttgtcggatttggaattgctgaatgaagtagaacaggaagaacctgcagatgatgagccggttgaagagatcgttgaagagacgatcgagaccaaagtcaaggaagtagatctggaagagctgaaagaagcggcagagacagagcatgtagaagtaatcgaggaacccgaaatagcagaagaggctgagatggaagatatggaaaaagaatctattaaattagaagaaaacgaaatcaaagaggacgagaagatcgacgaacttgttgatgatatacttgatattgatgatattcttgctgagtgggaagctgcagaaggcggcgcagagccggaagaagtgccggaagtaaatgaagatgatgtcgagcagattgagcgtaagccgaagagcccgatcttatctccggatattcagaggatgatcgatgagatcgaaggtgtgattccggaagaagaggtcaaagagactccggtacgtacggttgtgtcagaagaagttttggagaataaaggcgagattgccgaagaactcagactggaagaagaactggttctcgatgaggaaagtgcagaagagtacgaagagcttctggaagaagatgaggcagaggaactggatgaggaattcgaagaagagctggattatgatgacgagtatgaggatgactacgaatctattgcagcaggattcaaagaagagttcaagccgacattgagcaatgagccggatgaccgtgagattccggatgaggagcctgtagaatcggatatcctggcttcgaccgcaccgctgagccgaaaagagacagcgaagctgatcgctacaggaaagaccgcaccgcttccgatggacgagatcgcagatgcattgtcgatttctgataccggatttttggtacacagcagatatgatctgtctggacagggtgcaagaaaagccgggctgacagaagaacagaagaaactgttctcctactttgttccggtacgtggcatgagcgaacagctggtagatgttctggagcaggatcgcaattgtacgaacagaaaaggtacttcaaacacaggcaacctcctgatcgttggaaacaaggggaatggaaagactgttctcgcagttgatgtcgtaaaggcgattcagaagcagagaaagatccgtcagggaagagtcgcgatcattacaggcgaggcattgaataaaaagaagatcagtgatatcatagcaaaattatatggtggagcactgatcattgaaaaagccggaaaattaagtgaaagaacggttgcgaagctgaacaaggcgatggaaaaggatacaggtgagatgctgatcgtattggaagagcagagaaagccgctggatcgggttctttcttccaatagagaattcagaaagaaatttacaagcagactggaagtgccgatctttgtaaatgatgagctggttacattcggtcagacgtatgcacaggagaatggataccggatcgacgagatgggaatcctggcattgtacagccgtatcgatgcactgcagagagaagatcatgcagtgacagtcgcagaagtaaaagatatcatggatgaggctatggcgcattcccagaaggtatctgcaaagaaacttgtaaaacgggtacttggaaagaatacagacgatgcagaccgcattattttgacagaaaaagactttaatatttaaatggaaagtggaggaaagagatttcttccactttttttgaaaatatatacaaaaaaataagaaagaagctcttggaagaattagaaaattatataaaaaacgaaagaatgtgaggagatattattgcgttttttatgttaaacaggtgaggatttgttacatattgtgtactgttatcaaaattaggaaattattgtataaaaaggcgttatatgttgaaaaacgtagagaaatgtaataaatttaaatagatagacgatgtttatgaaatttttataaacatcagggattggggatggaagaggataaggatattatccaatgtttgaaaataagtaacacctaggaggagagttttgtgggaaagagtttgaatcaagcaaaagcaaatgcggttcgatacacgaagaagaaggttgagcactggcaggttgtttcccttgcgctggccggatacgatgcaatttcgatcattattgcattttttctggcactgtggtttcggtttgactgcaggtattctatgatcccaaaggaatttttgggagcataccttaaatttattggtatttatgtcatattttcgttattcgtattttggcgtctacgtctgtacaacagtatctggagatttgcaagctatagtgagttagtacgtatgatagttgcgacaggtatttcaagtttgtttcactgtacaggtatgacgctttttttgggtagaatgccgctttcgtattattttttcggaacggtgatccagtttggtatgacgctgatggtacgttttgcctatcggttcgttttactggagagaagtaagcggcgtaaaacagaagagatcgcaaaagcgaagcgggtacttctgatcgggggcggaaaggccggtcagatcatcctgcgggatatcaagaccgcaaaagagctgaaggatattgtctgctgtattattgacgataacccgaataaatggggaagatatatcgaaggtgtgccgatcgtcggcggtcgggacgatatattatcgtgtgtggaacgctataagatcgacaagatcattgtagcggtaccgagcgctacggcagaggaaaagagagatattctgaatatctgtaaagagacgggatgtgagctgaaaaacctgccgggcgtgtatcagttcctgaccggagaggtcaaggtgagcgctctgcgggatgtcgacgtggaggagctgctgggacgggagccgatcaaagtaaatatggaagagatccatgcgtttattcatggcaaaaaggtgatggtgaccggaggaggcggaagcattggatccggactctgtcgtcagatcgcatcgtatcagccgaaacagttaatcgtgtttgatatttatgaaaacaatgcatatgatattcagcaggagctgaaaaagaaatatcctgatctggatctggtggtcctggttggatctattcgagattccagacggatcaattcggtatttgcgacgtatcggccagaggtggtgtatcatgcggcagcgcataaacatgtaccactgatggaagacagtccgtgtgaatccatcaaaaacaatgcaatcggaacgtataagacggcctatgcggcgatgatgaacggctgtcagagatttgtcctgatcagtacggacaaggcggtcaatccgacgaatatcatgggagcaagcaagcgtctgtgtgagatgatcattcagtcttttgaccgcatgatcaaagagggcacaccggaaaagctgccgattctgtatgcccatgcagatgatgaagatggtgcaatggtgcagcagaaattcccaaaagatatcaagacagagtttgtggcagtccgttttggaaatgtgctgggaagcaatggttctgtgatcccgctgtttaaaaaacagatcgaagaaggcggaccggtcacggtgactcatccggatattatccgttatttcatgacgattccggaagcggtcagtcttgtcctgcaggcagggacatatgcgcatggcggggaaatcttcgtattggatatgggaagtccggtgaagatcgatactttagcaagaaacctgatcaagctgtcaggattgaaaccggatattgatatcaaggtggaatatacgggattaagaccaggagaaaagctctatgaagagaagttgatggcagaagaggggctgaagaagacgaggaatgaactgatccatatcgggtgtccgattccgtttgaagtcgaaacgtttttaaaagagctggagacgttgatggatatggcatatatcaatgcagataatattcgggaaaaagtagctgagatcgtgacaacgtaccacccagcaggcgaacatggaagcgagaaaaagggcgaagtgtatgagagactgctgggggaagagaaaaaatagaagaaactgcttagaaaagacaatgaagaatattaaaaatatcttatttataaagaggataaaagaatggatttgagaccttttgaaaaaaaagtatggttatcttcccctacgatgcatggagaagaactgaaatatatcacagaagcttatgaaacgaactggatgtcaacggtaggagaaaatataaatgaggcagaaaatctgatttgcaaaaaggtcggatgtcagtattcggtagcactttcagcaggaacagcagctttacatatggcggtaaaattagcaggtgtcaaacggggagaacatgtattttgttctgatatgacctttgatgcaactgtaaatccgattgtctatgaaggtggaattccagtgtttattgatacagaatatgaaacctggaatatggatccggttgcattggagaaagcgtttgagttatatccagatgtgaaaacagtggttttggtgcatttatatggaactccaggaaaaatagatgaaattagggagatttgcagtcagcatggggcaattttgattgaggatgcggcagaatcacttggggcatcttataaaggcatacagacaggaaattttggcaattataatataatttcatttaatggaaataagattattactggatcagcaggaggaatgctgcttacaaacgatcttgaagcggcaaataaagtacggaagtggtctactcaggcgagagaaaacgcaccgtggtatcaacatgaagagttggggtataattatcggatgagtaatgtgattgcgggtgtggtcagaggtcagattccatatctggaagaacatattgcagaaaaaaaggcaatatatgaacgatataaagcagcatttcaagatttgccaattgaaatgaatccgtatgatgaagtagaatcaaagccgaacttctggctgtcctgtatgttgatcaaaccagaagctatgtgcaaacaggtgagaggggaacaagaggctttgtatatcagcgaagctggaaaaacatgtccgacggaaattctggaagtattggaaacgtacaatgcagaaggccgtcctctttggaaaccaatgcatatgcagccgatttatcgcatgaatggatttgtgactcgtgaagggaatggaagagcgaagacaaatgcatatatttccggaggtgcagttggaaaagatggaaaaccgctggatgttgggatggatctgtttcatagaggattgtgtctgccgagtgataacaagatgacggtagaagaacagaatgttgtgattgagattataaagagatgttttgagtaaaagaagaaaaatgagtaaagtgaaaggaaggataggtatgcataaaaaaggggtttatgaaaagtatattaaaagaccacaggatatgttgtgtgcattgttggcactcatagttctttcacctattttacttattacagctttcttggtcagagtaaaacttggaagtccagtgatttttaaacaggagaggcctggattaaacgaaaaaatatttacactttataaatttcgaacaatgacggatgaaagagactcggaaggaaattttcttccggatgaagtacgtcttacaaagtttggaaaattacttagaagcacaagtttggatgaacttccagaattgttaaatattctttttggagatattgcggttattggaccaagaccgttattagtagaatatttgccgagatataatgcagaacaaagacgcaggcatgaagtacgcccgggattaagtggcttggcacaggtgaatggaagaaatgcgattagttgggaagataaatttaaatatgatgtgcggtatgtggatcatgtaacatttattggagattggaagattatattaaagacagtattgaatgtaataaaacgggatggtattaattccgagacagctgcaacaatggaagtgtttatgggaacagaagaaaaggtagaaaaaaatgtctaagaaattggtgattattggcgctagcgggcatggaaaagtaattgcagatatagcactgaaaacaggatatgaagttatcggttttttagatgataatgatactttacaagaaaattgtgggtttccgatcttaggaaaaactagagatattgtgaaatataaggatcaatgcgaatttgtaattgctattggaaataatagtattcgagagaaagttgcagagaaatataatgtacactgggcaacactaattcatccaacagctgtgcttggcataaatgtacaggttggagaaggaacagtgattatggcgaatgcagttatcaatccatgtgcaagtattggaaaacattgtattataaacactggagtaattgtagaacatgataatgatttagaggattatgtacatatctctcccaatgcaacactggcaggaacagtttgtattgggagaaaaacgcatataggtgtaggtgcatgtgtgaaaaataatatcactattgcagggaatgtagttgtaggtgcaggtacagtggttgtgaagaacattatagagactggagtatatgtgggagtacctgcaaggagaatgaaatagatgaaaagaattttgattttagcaaattttgatgttggattatataagttccgaaaagagttgattcaggaacttttgaatcagggaaatgaagtgtatatttctttgccggatggtgagcttgtaggaaatttggaaaggatgggatgcaagtttgtaaatactgtggtggatcgaagggggatcaatccaaagacagatgcgaaacttatgttcttttattgcaaattaattaagcggttacatccagatatggttattacttacacgataaaacctaatatttatggtggtttgatgtgccgtatgcttcgtgtgccgtatgtagtaaatattacaggacttggaacagcatttcagagcgagaatatgataaaaaaattagtgacatttttatataagattgctttgaaaaaagcaaaagtagtattttttgaaaatgtaggaaataagaggcttatgattgacatgagtattgtaagtgaaaagcaatcttgtgttttaaatggagcgggcgtaaatcttgaagagtatccgtattgtgaatatccagaagatggagaaattcgttttttgtttattggacgcattatgaaagaaaaaggaattgatgaattgcttgaagtggcagagaaaataaaaaaggaatatttgaatgtcttttttgatattgtaggtcctatggaagataattataaagaaaaaatagcatgttttgtgaagcgaggaattgtagagtataaagggtatcaaaaggatgtgagaccttttattaaaagatgccattgttttgttttgccatcttatcatgaaggaatggcaaatactaatttagagtgtgcttcttctggtagacctattataacaagtaatatatatggatgtaaagaagctgtaataaataatgaaaccggatttttgtgtgaggcaaaaagtgaaagggatttgtaccaaacaattcaaaaatttatagaaattccatttgatgaaaaaaaggagatgggaataaaaggaaggggatacatggaaaaatgttttgataaaagaaaaattgtgaaaagggtaattgaaaaaatatgaacgaaaaaccaatagttagtattattgtacctgtatttaatgtagaaaaatatttagaaaaatgcttaaatagtttgttaaatcagacttataaaaaaattgagataatatgtattaataatggaagcacagataaatcgggtgaaattcttaaacaatattctaaaatagacgatagaatagttattattacacaaacaaatcaaggtgtatccgtagcaagaaatgaagggataaaaaaggctaagggtaattatataatgtttgtggatagtgatgattggattgataaggatacttgtaaaattgctgtggaaactagtatttcatataatgcagatatcgtaatgtggagttatataagagaatttgaaaatacatctcgtcccaaagaaatttttagtgaagatgtgaagatttttagagatgtacagtgccaaactcaattacaaagaagatttattgggttgttgggagatgagttaaaaaaaccagaaaatgcagatgcgttgtgtcctatatggggaaaactatataaatgtgatattattaaaaaaaataatattatttttgaagacattagaaaattggggacatatgaagatggtatattcaatttgtactattttaagtatattgagaaggctgtttatatcaataaatatttgtatcattacagaaagaataatgggatgtctttgacaacaaaatataagaaagaattaccaaagcaatgggaaaatctttttagcgtgatgagagagtatataagagaaaatgaactgccagaggcgtatgatatagcgttgaaaaatagaattgcaatgagcattttgggcttgggtttaaatatattatattcaaatttatcttttaatcaaaaaaggaaggaattaaaaaaaatattatcaggtgaattatatagagagagctataaaaaaatgaaattgtcatattttccgttgcattggaaggttttttacggatgtgcaaaatacaataatgcaattggtgttctaacaatattaatgatgattcaaaaaattatatataggtgacagtatgggaattgaagaaaatattgaggaaacatctccattttttagtatagtaattccaatttataatgtggaaaaatatcttagaaaatgtgtagatagtgttatagaacaagaatataagaatatagaaataattttggttgatgatggttcaccagatgaatgtcctaaaatttgtgatgaatatgtagagaaagattccagagtaaaggtgatacataaattaaatgggggattatctagtgcgaggaatgcaggaacaaaaaaagctactggaaaatatataatttttttagatagtgatgattattggaataggaaggatgggctggggaaaattgcggaaagactacaggaagtagaagttgatgtattatcttataaatgcatagattattcttgtgttacaggaaaacaatatgtaaagaaacaaaattatgattgtgaactaattagaagtagaacgaaaaaagaaattttaaaatattatttccagagtggaatgtttccaggggcagcttggcttgttgtgacaagaagaaagtttattatagaaaatcagttgtattttattgagggaattaaagcggaagatatagattggcttttaaaagtatatttaacagctaacaagtacgatgcgttaaatgaggacttttatgtctatcttaaatatagaacggattctattacaggaacagcggatacacaatctatagataatatattatttactatttcgaaatggatagaagtaatcgaaacggaacagtatgagtatataaaaaatgatatatataagtttttatcaggacattatttatgtgcaattttaattttagataatatatccaaaattaaaaagaagaagtactgtaaaattcttaaagaatataaatatttattaaaatatgattgctctttagtagggctatgtagtcaactaatatatagtttatttggtgtgttagttttgtccaaactattaaataaatatcggaagatgaaagctttttaagtttctgtagtggagggattaaggtgaaagtattaattatttcagctgaagtttggagaaatgataaaaatggaggaaatgttttgtcaaatatatttgaaggaactggatatgagtttgcacaaatttattgtaatccaggtcagccaataaatagtttatgcaaaaaatactatcaaataacagacagtatgctagttcgtaatattttgaaaggaagtagagttggtaaagaacttatatttgaggactttccaaatgaaaataaagagaaaagacaggaagcggttttggaaaataaaaaaatatatggattttttagacgacatagattggaaagtttttatgtgatgagatctttattatggaaattagcaaaatggaagagtcctgaactggaaaaatttatacgagattttcaaccggatattatttttgctccatgctacgcatcacatgaaatgttagcgttagatagatatgtcaaagatattgtgaacaagcctatgatttcatatatttcagatgataattatagtgttaaacaatttagaatttcacctatatattggggtaatcgttttatattaagacataatatgagaaaaacatttccgttttatgaattggtatatacaatgacagatgaacaaatggaggagtacacacaagagttgaaatgtaatatgaaaatcctaaaaaagtatggtgaattttcagaaagaaatgtaaaacatgaagtgaatacacctattcggttaatttatgcgggaggaatatattgtggtagatggaaaacgttagctaaaatagtggagtgcttaagaaaaattaaccagaaggaagtacagatggttttagatatttatacaggaaataaattgacagataaacagatgtctttactgcatgatggaagaaatgcttatgtgcataaaagtatatcaacaaaagaattaaagcaaaaatataaagaaagtgatattgctttgcatgtggaatcctttaaccttaagtataaattgttaacaaggctttctttttcaacaaaaattattgactgtttagaaagtggctgtgctgtaatggctatctgttggaaacaacattcaggatatacttatttgaaaaaagaagatgcagcaatatgtattgattcgactgaaaagatagaaggagtattacaacatattgttgataatccagagcagattttgttgtattcaaaaaaggcatttttatgtggaaaaagaaatcatcaaaaagaaattatacaaaaatatttgaaagaagattttgaaacaataggattatgtaagtagaggaaaaacaaatgaaaattgctcaaataaattcagtgtgtggacatggtagtacaggagagatatgtatcagcttaagtaaaagtatgtctgaaaatggaatagagaataaaatttattatggtgtaaaagaatcagattttgaaaaaagtgagttttttggaagtaagttaggaataaggatgcatcaaattaggacacgatgtttcggtcatcatggattttattcgaagaaagaaacgtatgcattaataaaaaaacttaaagagtttcggcctgatattgttcatttgcataacttacatggacattatattaatgtaaaagtgttatttgattttcttaaaaaaatggattgtaaagtagtatggactttacatgactgttggcctataactggtcactgcgttcactttgattatgaaggatgctttaaatggaaagaaggatgtaaaaattgtacacagttgttgacatacccaacaacgtatttccatgatccttcggaatataattggataaagaaaagagaaatttttacatctataaatgatatgactattgtcacagtttctgagtggttgaagcaaatagtaaagcaatcatatttaaataagtatcatgtacaaaggattttcaatggagttaacacacagatttttaagaaaaaagatgtgtctgatttaaaaaaacagttaaatttagaaaataaatttgtaatcctgggaatggcaggaaaatggttagatgagcgaaacagagtattatttcaaaaaatttatgatatgctagaacaggatatgcagctgatattgattggtaatcatactaatatagatgaaaaagattataaaaaaatagtatttatagataaaattaataatgctgatttattggcaaactactataatttggcagatgtttttgtgaatctttcctatgaagatacttttggtttggttaatgcagaagctatgtcatgtggaactccaattatttcatttgattctacagcatgtggggaggtcgtggggaatgacgaaaaatgtggtatggcattatcacctaaagtaagcggaaggaagttatatgagtgcattttggaaattaagaagaatggaaaaaattcttatacagaaaattgtataagaagagtagaattattttttgatgaggaagtaatgaaaaaacaatatatggatttgtaccatagtatttatgaagagagagcaaggagtacaaattaatgacaatttatttatgtaatattatactgttattcgcttttgcattaattttcctatataaatctcctacaaaacaaaaaagaaaaattttcgtatgcctcgcatccttacaatggattttgttatcagggttacggcatgtaagtgttggtgctgatacgtatgaatattataatagttttgttcgttcatttgatgtttcatggaaagaagctatggaaaattttagaggtgtactatcgggggatatcgaaggaaaagatcctggatatttactttttgaaaagatatgcggatattttacaagtaattatcaaatatacttaataattgtagcaattatatttactggtttgatggggtattttatttatgttaattcacgagatccctttattagctttttgttatattcatgtttattctacgcttttttttctattacaggtataagacaaactattgctacagctctaagcgtatttgttgggtatgaactcatcaaaaagagaaaattactgttatttgtttgtattatattattagctgcaacactacataaatcagcgttgatttttttgccttattattttttttataatctgaatattaacttgaggtataaaatagtttcaagcattgtgattttatgttcttttatttttaaatatcctctttctgcatggtttaaggaaattgcgggatatgataattatggtgtgtatgtaggggcaggtgcaaacacattcacattactgttgatcttattagttatgtttatgtttgttttttcaaagcaaatattatataaaaatgagaagaataaatattattacaatgccttagttattgctttattttttgtaccactgacttatataaatccatcagctatgcgaatagttcaatattattcaatatttatgatgcttgtaataccagaaataatttgtgtatttaaggaaagagatcaaagagttgttaagtttctatttatatgtacgattcttatattatttttaaaggcaggaaattcaggatatctatttttttggcagaacaatggtatttaagagtatataaataaaaaatcaaattttgagattcgtacacctttctgagtgtgctgtcaggattctttctttctaggattaacatctacaagagggggattcgcaatgggtaaagcggataacgccaatctcagacataagttgtgaactaagtatggcatctacaccattcatgtccatgacaatcgaatattctggcagtgtggaagaaaaatcatttgattttcaggtaaagggattccgcagtttcagaggcagtattcagcaatgatacagcctgccaatcagtatttttgctatgtcatcctgttgaagatacaacaattaggttagaagaaagatgataagtttcttaaccttatttgcgttgaagtcatagctccatgttcgaaacagcgttgaaaacgccctatagaaatatttagtgatttagaatgagtgcaatccgtatgccagttgtatggaaaaaaacaattcacccatttctggctactgtcgttgcaagcagggctgtcaaagaaatcattcacttctggataattctggtcaagaaggaaaataagattgtttttcatagcaattttttgagttatatagaagctaaactgctaattcatagtgttcactgatgtgctctatgcaaatttttgttctactatcaaggtgttggaattgttcaatctagtagtttatggtagactgagtttccatacgaataccggagtgctatctgtgcaaaacgaatgttgtggatgaggggctggttagctgatttacttacggacgtaaagcactaggagtgatagggcagacctattgcaccacacattctaacagtttaagaaagaaaatgaacaatttttactgactgtaagaggtattaaccataaagatattatacgaggagaaagtgaaaatgaaaaaaatagtggcagttatattaaattatatgtcatatagagaaacaattgattgtgtaaatttgttgaaagagcagtcctataaaaaccatgaaatagttatagtagataatggttctaaaaatgaaagtaaagaaaggttacatgcttgttttgataacaattctggtatatatattattgaaagcgaaaagaatttaggatttgctaaaggaaataatttaggtataagatatgccagaaatattttgaaagcagattatgtttttgttgttaatagtgatattttaactagcaaaatattgtattctgaaattataaaaataaattattcaggtgtaggagttatttcaccatcggtaattaaaaaaaatggagaaaaacaattaccagcgataaatacagataatatagaattgactataaaaaacactaaaaagcaaatagaaatagctgtattgttaaatttacctataatttcatctatttatagatgttacaaaaaaataaaatcaaatgaagagctagcagaaccgcaggaaaataaacgatacgctattcaaggttgttcatactttttaacaccacttttttttaaatattataacgaattgtatcctgagacatttttatattgggaagagattgatttagcatattacttggataaagtgggtttaaaagcgataattgttaatacgtcaccagttattcatttagatggtaaatcagtagaaaaattaatttcaattaagaaagaaaaaaagaaattaaagtattctatagaaagtatgaaaaattcgttaccactatttgaaatgagttacaatgaaattaaagaaaagtataatatttagaagggaataaaatgagtcaaaaaactacaaaaacaccagtaatgatgctcttttttaaccgtccaaactctttaaaaaaagtatttgaagcagttaaagaagcgcagccagaaaaattatttttagtccaagacggggcacgtataggaaaaggtgatgaggaattaattgaagaatgtagaagaattgtaagtaacatagattgggattgtgaagtatatcgaaattattcagaagaaaacatgggatgtggtatgcggatgtattcaggtatttcgtggtgttttgagtcagtagataggcttattattttagaagacgattgtgttccaaaccaaagttttttttcattctgtgatgaaatattggaaaaatataagaacgatgaaagaataaatatgattagcggaatgaatcatatgggagtgtatgagaacacacagtacagttatatgtttgcaaaaacaggttcttgttggggatgggcaacgtggcgtcgtgcatggaagaatgttgaatatgatatgccttttataggagatacagaagctttgcgccttatttcagatgcagttacacctaaaggatacggagattatctcattaaattaggaaaggaaagatataaagaatataagaatggaggaaaactatcagcgtggacatatcagcatggcatgtctatacatttaaattcacaattaataattgttccaactaaaaatttgatttcaaatgttggtttgactgaaaatagtacacatgcagtttcttcattgaaaaaacttccacatgcaacacaaaagttatttatgatggaaacatatcccttagatattccattgaaacatcccaaatatataattgaaaatgttgaatatgcaaagcaggttggaaagattctaggaggtaataagtatggaagacggatagaagggtatgtaaggagaatagtgtttgcagaaaaaggtgattatgcaatattgtttagaaaattgtgtgaaaaattacacattaggaattaagaggttagtgatggaagtaataagtattatagtaccagtatataatgcaaaaaaatatttaaataaatgtgtagattcaattttaaaccagacatattcagaactggaatgtattttggttgatgatggttcaacagatgggtcatctgaaatatgtgatttttatggtgaaaaggataaacgagtaaaagtgattcatcaaagaaatatgggacaaagtgctgctagaaatacaggcattaaaacagcaacaggaacctatatttgttttgtagataatgatgattccttaccagatgttaatactctattagaaatgaaaaaagcaataggcgaaagtgatattctaatagctgatcaagaaatttttaagtcggaacaagataaaataaatagattagctgagtattataatccacaaatggcaggatatttatgtgctttgctaaaatcaggacaatataaaggaactgtttggtcaaagctttataaaaagaaagtgtttgtagataataatatttggttttctggtaatctgatttgtgaagacgaagagctttctccaagattattcgataaaatagatagaattagctttttgaatagaaaatgttacgaaagatatagaaaccccaaaagtcagacgaatacaatggatgagagaactttttttagaaaaagtcaagatagattagaagttgcattaagattgaaaaaatattttgacacaaagaaatatccaatgaagaataagagaataatatataagcatatttgtgggttgtatttacaagggatttcttttgccagacatgtgaaggatattgaaaaggtgctagtgttagaaggacaagtggaaaacagtatgaatctgttaatagagggggggggaaagtacggtttgccaaagtattttttggcaggaattatgttgaaaatagttggaatgaggatgttgctggaattcctaagaacattcacataaagagaaagctataataatagaagatgaatgaaaaaagttgataggatgttcggaggaaaatgtatttgggagagtataaactatgtgggtttatttaaaagagcaagtcaaaagaagtacattgcttaagaagttatattattcaatattttctataatgtttgggcataataaggaaaaactttcagggataggaaatgaagtatcgtttgctataggatataagagaagatgcaatatttatgtttttggaaatagaaataaaatagtagtaggaaaagattgtaatttaaaaaatttgtctattgttatatatggtgatggtaactgcgttgtaattggggaaaaatgtatttttgacagtgctagaattcatatagaagataacaataatagtgtagtaataggtgataatacaacaatacagaaaaatacggaattagcgtgtatagaaggctgtgaattgataataggagaagattgtatgttgtccagtgatatttctgtaagaacaggggatagtcattcaattattattaaggacggaaaaagaataaatttgtcaaaaaatgtatacataggtaatcatgtatggattggaatgagagctcttgtaatgaaaggaagtaaaatactagacaattctataatcggtgcaggatctttagtaacgggaaaatttagtcaaaaaaatattatgttagcaggtagtccggcaaaaatgataaaagaaaatgttgattggaaaagggagagaatatgagtaaagtattatctgttattttacctgtttataatgtggaaccatttcttacagactgtttagaatcttgtatatttcaagacatagaaaaagaagattacgagattatctgtgttaatgatggttcgacggatggtagtgaaaaaatagttcaacagtatagtaagaagtatcataatataaaactgataaatcagaaaaatagtggtgtgagtaaagcgagaaatattggatttcaagaggcaaaaggtgagtttgtttggtttatagacccggatgactttattgaacccaatgtatttggatatatagtaaagaggattgtggaatttaaggcagatatattaaaggttgcaagagacagtgtaacggaagaaaaacattttgatgctttatctgaaaatgaatggaaaatgggtaatgatttgtcacagacaggagctgtatggcagtatattgtgcgtaggagtaaacttttagagaaagaagtaatatttaatgagcagttagcatatggagaggattatttgtgggaatgcataattcgtaaagaaattcctaatataatagcaatggaaaatgttgtgtatcattaccgaattagacataattctgctatgaattctaaaagtaaagaaagtgcagatagacatttagaaggaatgataaagttagcaggagaatataaaaaaatagagaatagatataatgatggaactgttaaaaataaagaatttcttaaaaatatagataaaagaatcagcttatcagtacaagctgcaatattggatttgttacgttatgattatacatggaaagaaatagactggtatattcgtgttatgaagagtcaagaaatttacccctacgcttttcagtgggaaaatttgaaagtaacaaaatcattaaaaaaagtaattatggggtatattacatttttgtttccatgtaaaggatatattagattttggcactgtataaaaaaaagagtagagatgaaaaaaacacccaaaatatacgtggggggataacctcagtattttctaaagtaacctcaaaacagtcaatgtgggtgaatcagcttagaaaagtatataatacatggttaaagttcaaaaataagaaccataaattttgtataatatcttccaattgcgtgggtggttgcattactcatgatttaggggagaaatttagaagtccaaccataaatttgtggtttgaaccatgggattttatcaagtttcttaataaaatggaattttatttgaagcaaacattagaacaggataatttagagagtcaaaaacaaggatatccagtaggaaaacttgcagatataaagatatattttcaacactatactacatatacagaggcattagaaaagtggaatcaaaggaaacaaagagttgataggaaccatatttatgttgtgatggtaaatcatttagatgaacatacagatgaagagaaattaatagaggcttttgaaaaagtaccatttgagaaaaaagttttttttacaaatcataaagaaatggtaaatggaaaaagtgtattttatatagaagggtttgaagatagtaacactttagaaaatttgatgtattttcaaaataaatttggtattaagtattatgatcaatttgattatataaagtggctaaataagaaagaggttgaagatgaaatcaatcagcattattgttccggtatataatgtagaaaattacttaggaaaatgtgtagaatccatattaaatcaaacatttaaagattttgaacttattttggtggatgatggttcttcagataaaagtggtgtgatgtgtgatcaatacaaagaacaggataaacgaattaaagtaattcataaagaaaatgggggattaagttctgccagaaatgcgggattagaggtggcagagggagaatatataggatttattgatagtgatgattggataatgccagatatgtatcagtttttatacgatatggcaattataagcaatgcagatattgcccagtgtggttttcgaaaagtagatgaaaaaggttatgaatatagtgaggatagtgttagtgagggttttgttacaaaacagtacacgggacaggaagctattaagcaactatatggaaagacacaggaaaaggaaatcaattttcttacgtggaataagctatataggtcaacactgttttcaaacctgcatttttcagaaggaaaaaataatgaagatgttattatgacatccaaaattttaacaaaaatagatattgttgttgtaaacaataaaccgcaagtaaattatttacagagaaatgatagtattatgggagcgcagagagataataaggtaaagatgctattatctcatgcaagagcttatgaagaggtgatagattattatagagaaaacggcattgaggaactgggactagtgaaaaaagtttttgcaaattatttgttaagtttaatgaaatatttatgttttcaaaagataaatgaagaagcaaaagaatatattaaatatattttgaagcaaaagggatgtttgtgtttgaaagactttactggaaagggtaaatgtgtgtatataatcatgaaactgtttttaagggggaagtatggtagatattagtattattgttcctgtgtataatagaaaggaacgtttaaagcagtgtatagattctattcttcggcaatcttttaggtcttttgaattgttacttgtagatgatggatcaacagatggaagtagccagatatgtgatgaatataaagaaattgattttagagttaaagttatacataagaagaatggtggagttagctcagcaaggaatgtaggattaagttattcaataggaaagagtattgtatttatagatagtgatgaccgagtagatgaagtttatttagagacgttatatgatgagtttttaaaaaataaatctcaattggttatatcaaaagtatacagagaacttgataagagaaatgtagagaagtatacagattcttttgtaaccataactcaagaaatgtcttcaaaacaatttgcactgttattagagaaagaatatatatgtggagttctcggaaaattgtatgcaaaagaggctgttgagaatttaagatttagagaagatatgcattttggtgaagatttagtttttaactttgaagtattacgaaaaaatatttccatatcacttttaaatagttatttatattgttattgttatgaacctaatggtttatcaaccggatttagaagcacaaaacctacagattttttagttgtatataatactattttagattacatggaatttagaggatttttttcagaggatgaggtgaaaatatattctaaaagaatactttatgattttctttgggcaattgaacaactaaaaaatgcacctgcagattttagaagcaatatgatatggaaatatgtacagacactagggtctgataggcgtataaaaaaatatatatacaagggtataagctatagtaaagtaaaatattatattaagattttattaaaattagattctaattttttatggtacatatatgtgaccctaacaagaaagaggtaagctgagaagtgaaaagaacttttataaaattatatagctggatacttcagtttccacaaatgaaaatcataaaatcatgtattctcagtaaaaagtatggcgttcatttttgggtttttaaaaggtgtaaaatatatattgcaaaatctgctcacatcatgctacagggatatttacatgtgaatgaaccttggaaacatggacaaaagagttatgcaacatttaagatagaagataatgcaacattagaagtaaaaaatggtttccgatttcgtagtggtaattacatttctatagaaaaaaatgctaaattggtgttgggaagcggttcaataaatagaaattgtaatttgtcttgttttaaatatatttcaattggcgagaatgttcatatttcagaaaatgttgtcattagagatagtgataatcattatatgttatatgatggatatgtacaagctgcaccaataataataggcaataatgtttggataggattaaatagtacgattttaaaaggagttactattggagatggtgctgtgattgcagcgggaagtgtcgttacaaaggatgttccgccaaaagctttagttgcaggtgtaccagctcgagttataaaagaagaagtggagtggaaagtatgatacctaagataatacattgtgtttggtttgggcaaaatgagtttcctgaaaaagaaaaaaaatgtattgaaagttggaaaaaatatttgccagagtatgagattatggtatggaatgaaaagaactttgatttaaatcaaaataaatatgtaaaagaagcatatattctaaaaaaatatgcatttgtatcagattatgttaggttatgggtattatatcatcatggtggaatctatatggatacagatgtggaagtgataaagtcttttaatgattttttaaacaaaaccgtttttttaagttttgaaacttcgatggtttcgattgcagtgtgtggagcagagaaaaataatttatggattaaagaattgttagatgaatatgaagaaagaaaatttttattacccaatggagcaattaatattgtaactaatttgagatatgtaaccaatagttgccagagacatggattgatacggaatgaaaaatatcaggttttagataataatgtagaggtgtttgaaaaagaatttttcattccggaagtgaaaacagatggaacaatattagttacagataacaccgtttgtatacatcattattcagcatcctgggtttcaaaaagtaatcaattgtttttacgcattggtaggagaataaaatatttgttcttctattgggtagtatatgaatttatttttactaaagaaatataggtgaggtgttattttgaataaaaagcagctttttttaaatataacagccaatattttagcatttgctgtaagtacaggaattaacttttttttaacaccgtatattataaattctgtagggatagatgcttatggttttttgcctttggcaagtaattttacaagttatatcactgttataacaagtgcatttaattcaatgtcaggacgttttattacggtaaaaatgcatgaaaataaagaagaagaggcaaaacaatatttttctacgacattttttgttaatttaggtttagctgttttttctgcaatggtatttttatttactgttatattgttggaaaattttataaatattccaagtaatattctggaagacgtgaaacttttgtttgctttcacgtttatggcaacagtgatagggttgattactgcggtgtatggtgtcgcaacattttgtcagaatagactagattataaatcaatggtcagcatcggtggaactgtattgcgtgcgacgattttaatatttgcttttgtgatttttaaaccgaaattattttatattggtttggcaacagtagtgataattatctatgaaggtattgtaaattataaaatatctaataaattattacctcaactgaaagtagattttagatattttcaaaaaaatttgataagagttttattgtcttcaggaatatggaattcatttaatttactaagtagtgttttaatgacaggattagacttattaattacaaatatgtttataggtgcggaagaagctggaattttaggaattataaaagttgttcccggattaatttatacaatcgtttcattaatgattacttcttttgcgccacaatttgtacaggattttgctcataacgatatgaagggattagtaaaaaatatggatttttctgctaaattagtggggttcattagtgttattcctttggctggatttgtagcatatggaaaagaattctatcaactatgggttccaacgcaaaatgcagagttgcttgttactttgtccgtattatcaatgatatcttgtttagttagttatcctatcagtgcatttgataatacatttacggctgctaataaattgaagtggccggcaatagcagtctttatttgtggtatgttaaatgttattattgtttttttgctactaaaatttacaaatttagggatttttgctattgcggctacaagttctgttttgataatgcttaaagatttattttttaaaattccatatgttgcaaaatgtgtaaatacaaatcctatacatttctggaaatttataattcgatatattattgcttttgcgtgtataatagtgttatcttttatagttaaagctgttgttgttattaatacttgggctttgttgatagtagatgcaacaataacagttgcctttgctttgctatttaactatttaattttattggataaagaagaaaaagcatggatgattaatagaataagaaaagtatttaataaataatacaattgaattgaaggagtgtgtaaatttgaaaattacagtagcgggaacaggatatgtcggtttgtcaattgcaacgttattggcacaaaataatgtagtgatggcgattgatattataccagaaaaagttgatatgattaataatcgaaaatcacccattcaagatgaatatattgaaaaatatttagccgaaaaagatttaaacttggttgctactttagatgccgaaaaagcttataaagatgcaagttttgtagtgattgcggcacctacaaattatgatagcaaaaagaattttttcgatacttctgctgtagaagaggtgattaaatcagttattcagtacaatcctgatgcaattatggtgattaaatcgacaattccggttggatttacggcatcagttagagaaaagtatcattgtgataatattattttcagtccagaatttttgcgagagtcaaaagctctttatgataatttgtatccgagtcggattattgtaggtacagatgtcaagaatgctcgtttggtaaaggctgcgaatacttttgcagcattattgcaagagggggcaattaaagaaaatatagaaactttaatcatgggatttactgaagcagaagcagttaaattgtttgcgaatacatatcttgcattacgggtttcgtactttaatgaattagatacttatgcagaaatgaaaggactgaatgcacaacagattattgatggtgtatgccttgatcctcgtatcggctctcattataataatccttcatttggatatgggggatattgtctgcctaaggatacaaaacagcttcttgcaaattatgaagatgtgcctcaaaatatgatgtctgcaattgtagaatcaaatcgtacaagaaaagattttgtggcagatagagtgcttaagatggcaggatattatgattattacaatagaggagagttttcagcggaagaagaaaaagaatgtattgtcggagtttatagattgactatgaaaagtaattcagataatttccgtcagagcagtattcaaggggttatgaaacgtataaaagcaaaaggagcaacagtaattgtatacgaaccaacattgaaagatggcagtacatttttcggaagtaaagttgtcaatgatttagaagaatttaaagaaaagagtcaggtaattattgcaaatagatttgacagttgcttggaagatgtccaggataaagtatattctagagatatatttaaaagagattaaggagaaggtagaacaatgagcatatttagaaataaaacattattaatcactggtggaacaggatccttcggcaacgcagtcttaaaccgcttcctcgatactgatatcaaagaaatccgtattttctcacgtgatgagaaaaagcaggatgatatgagacatgagtttcaggcaaaaatgccggaagcatcaaataaaattaagttctttattggggatgttcgtgacttggcatctgtaaagaatgcgatgcatggggtagattatatcttccatgcagcagctttaaaacaggttccatcttgtgagtttttcccgattgaagctgtaaagacgaatgtactcggtacagaaaatgtattaacagctgcaattgaagaaggtgtaaaatctgttatctgtctttctacagataaggcagcttatccggtgaacgcaatggggacaagcaaggcaatgatggaaaaagtcattgtagccaaatcaagaaccgtagatccggaaaaaacaaaaatctgctgtactcgttacggaaacgttatgtgttcccgtggatctgtaattcctctttggatcgaacagatcaaagcaggcaatccgatcaccattacagaaccttctatgacaagatttattatgagtttggaagaagccgtagatttggtgctgtttgcgtttgaaaatgggacaagcggagatattttggtacagaaagctccggcatgtacgatagaagtattggcaaaagccgtgacagaattgtttgcacctggacatgaaatcaaggtgatcggtatccgccatggagaaaagatgtatgagacattgctcacaaatgaagaatgtgcaaatgcaattgatatgggtgagttctaccgtgtgccatgtgataagagagacttgaattatgataagtacttcaaagaaggggatgtggaacgaaacacattgacagaatttaattccagcaatacagaattactggatgtagagcaagtgaaagaaaaattgttgacactgcagtatatccgagatgaattatcagagtgggagaatcgataatgaaagttcttataacaggtgcgaaaggttttgtcggaaaaaaccttgcagccaacttatattgtatcaaagatggaaaaaacagaacaagagatcttacaatcgatgagatctttgaatatgatattgataccgaggaatctctgttagatacatattgtgagaaagcagactttgttttcaatcttgcaggggtgaaccggccaaaagagcagtctgaatttatggatggaaatttcggatttgcatcgaaactgttagacaccttgaaaaagcatcataatacctgtccggtgatgctttccagttccattcaggcaaccttgatcggacgctatggtcagtctgattatggaaagagcaaactggcaggagaagagttatttttcgaatatggcaaagagtgcggagcaaaagtactggtgtaccgtttcccgaaccttttcggaaaatggtgcagaccaaattacaacagtgcggtagctacattctgcaataacatcgcaaacaatctgccgatacaggtcaatgacagggctacagaattagagcttctttacattgacgatctggtagaggagatgctggatgctctggaaggcaaagaacaccactgtgaatatcaggaattggatccggtagcagatgaagcaggaagatattgttatgttccaacgacccataaggcaacgttgggagaaatcgtagatttattagaagcattcaaaaatcagccgaaaacccttctaatcccggaaatcccagaggattcgtttgcaaagaaattatattcgacatatttgtcttatttgccaaaagaggaggtcagttttccactgaagatgaatgtggatgacagaggaagctttacagagctgttgaaaacagcaaattgcggacagttttctgtgaatatttcaaagccgggaattacaaaaggagaacactggcacaacagcaagtgggaattttttattgtagtgtctggacatggcctgattcaggaacgcaagatcggaacggatgaagtgatcgaatttgaggtttccggcgagaagatcgaggcaatccatatgcttccgggatacacacataatatcatcaatttgtcagaaacagagaatctcgtaactgtgatgtgggcaaacgagcagtttgatccgaagcatccggatacattttttgaaaaggtggaagaaaaatgagattgatcatcttaggagcaggcggatacggaaaaaccgtagcagacattgcaaggcagtctggaaaatatgagcagatttattttctggatgacggacaggaaacatcagatttgatattgggaacatgcttagaatatatgaaatttgccgatgggaatacagaaatgtatcctgcatttggaaacaatgaaatgcgtttggattggatgaaaaagttatccgatgcgcagattgtacttccgcgattgatacatgccacagcttatgtaagtccaactgcagaagtaggagccgggacagttgtattgccgcttgcgatcataaatacagattgtcggatccaatcgggctgtattatcaattgtggttcgattgtagaccatggatgtgtgatcgaagaaggcgtacatatttctccggggactgtgatcaaggcagaaaatcggattccaagagcaacaaaaattgaggcgggcgaagtggttccattgcgagcatacccgctgtgagggagaatagaatgaaaacagaagtgacatttaagaataatgggaaactgaaattattgatcattgtagggactcgtccggagattatccgcctggcagccgtgatcaaaaagtgccggaactattttgataccattctggcgcataccggacagaactatgactacaacttaaacggtgtatttttccatgatctggagttggatgatccggatgtgtatctgaatgcagtgggtgcagatctcggagagaccatgggaaatattatttccgaatcttataaattgatggcagagataaaaccggacgcagtactggttctgggtgatacgaacagttgtctgagcgtgatcggcgcaaagcgtcttcatattccgattttccatatggaagcaggaaaccgttgtaaagatgagtgtcttccggaagagacaaaccgccgtattgtagacattatttcagatgtgaatatggcatattcagaacatgcccgccgttatcttgcggactgcggattgccgaaagaacgtacttatgtgacaggctctccaatggcagaagtgctgcatgataatctgaaaaaaatcgaagcatccgatgtacatgcccgtttgggattggaaaagggaaaatatatcttgctctctgcacatcgtgaagaaaatattgatacagagaagaacttcttatcactctttgaggcaatcaataagattgcagagaagtatgatatgccaatcttatattcttgccatccaagaagcagaaagagattagaagcatcaggattccaattggatcaacgtgtcattcagcatgagccgctaggcttccatgattataactgtctgcagatgaatgcatttgcggtagtgtcggacagcggaacattgccggaggaaagcagtttctttacctctgtaggtcatccgttccctgcggtttgtatccgtacttctacagaaagaccagaagctctggataaaggatgttttgtgcttgccggaatcgacagcaattccctggtacaggctgtggagacagcagtggcaatgaatgaaaacggagattacggaattccggtaccggattatgtagaagaaaatgtatccacaaaagttgtgaaaatcattcagagctatacaggagttgtgaataaaatggtgtggagaaagttttaggagtgtagaaaacgtttcgctgtgtaaggagaaatcattactatgcaagaatattcaagaattctaattgaagaatattgtatgactcataattcagcaaaaagcagaaggctgcaaaagctggttaagatgtcatatgatatgtatgcggaaggaaacgagagtgatgcgatttttctggaaaaagcaattgatcaggaaatgaatgaagaattgagagaagcgcttcaggatttggatgattttttgtttggatactaagttacgcattgggagaatctatatcggagaaaatccaatcgaatatcatcagctttggctgttctggccagggctgatgatacatgaaacaagtcaatgctgcttcggttcccagatttttcaaaaaactgcgcaatacagagcgtagttctataaggcatcactcgttacagccttccatacgcgtatctatgaacattttggcatggaatataccccgtttgtccgggatgtccctcccgaaaaactgtttgaatccaagcctccaattggttactgtacaacttctggtcaaattgaccagaagtcctataactatatcttgaacttatattttccttttccgtaaccggatacagattcaataatatctgcctgcacaagattggaaagcaattttgaagcacctgaacctttcaaatcaagaagctccataactgcacttcttccaaaaacttcatcaaaaccaaacttctcaaaaagtttatggatatgaacattcgtttttacggagaaatttctgcctctttcggaaagtacactttcaatatccactttttggacttgaatgtccacttttccattctcaatatccacttttgtatattcaatgtccactttttcttcatttaaacgtccacttatgtgaagatttcgattgtgaagctcatttttctcgttcaagagtagatttctgagaaatgcttctagatattctgttgtttcatgaatgtctttttgtagattcgtatagtttgcacgaacaagtgcatttctgaaataccacgcattttccgcaaaaatatcgttggttacagaaaaccccagtgttcttaaatatttaatgaagaaaaccgccgttgttcttgtattaccttccccaaagatatggatttgccataatcttgaaatgaatactgcaagatgatgaattatctcgtccattgaaagccctttatagctaaaagctctctcctgcgaaaaatcatattcaagtgtggtttccagttcagacgcactaccatacataacggttgctccatctagcacccattctttctttgtaatattataatctctaatctttccagcatgcttgtaaataccttgaaaaagtttgcggtggatagagatatactcatttggcgaaaatgaaaacgctgtttcagaaaggatttccgcaatgcgggaagaaaccttatctgcttcttctgtgcgctcatcatcagataaatgcacggatctttcctcatagtagctgtcgataagactctgtgcttccttcatcgtgattttgccttcaatattctgaatggcagtatcaatcagatatttagacggtttcagtccgtccactgcttgaagtccgattgcggtactccacgcataacctttatgagctttatccggctcagactctctcaaatattccttaaaggggtctttttccattcccactacctcgcttcataatcgaccatttccaactgctgatatacttttccaaacatttctccctctatatcaattatctgataaagtagttcttcgttatgcagttcatttgattttccaatagaatcactaattctgatttaaatttggcggagaaatttcttcttgttcgagacataataacaatccttctttctctaatatttacagtatatcagattcattaagaaatgtctcttgaagtgtcttaaattacgataccattataccaatgccgtttcgggcagatattcaaggaagcgcagaggaattctaatattttacagtttgaaggttagcataaatatatggcatctgttataatgaagggtagacagtacggaaatactgaaaggaaagaggagaaagacaaatgaaaagattattgattctcggagccggaggtttcgggcagatggtgaaggaaacagcgctccagctgggctatgagaaagttgtatttctggatgatgcagcgtttggaaaagatgtagttggaaaatgttgtgattatgttgaaaaacatgaggagtacgagacggcagttgcagcttttggaaacaatcacacacgtttgttctggacggataaattattggaggcaggatatgaggtacctgcagtggtacatccctctgcagtcataagccccagcgcagttctggaacccggatgctttgtgatgcagcgtgcggtagtcaatacgcatacaagaatcgggcgtgcagcgcttgtcaacagcggagcagttgtggatcatgattcggttgtatgtgccggcgcacatgtaggacttggcagtgtagtaaaagcaaactgtaccatcgagcaggaaaagaaggtagaggcaggagaagtgatcttctctaccagaagaaaaatcgaaggtgtggacagcagagcacttgaggacgcattgtatgcatttggatttggtccccagtgcagctatgtaaagccatttggagaaggtcatattaatgagacatatgcggtgtatatgccgacggaagacgggacagagaagccactgtatgttttgcagaggatcaatatcaatgtatttaaagaaccgggacaggtgatggagaatatttttggagtgaccgagtttttgcgggatgtgatccgcagggaaggcggagatccggacagggagacactggcatatatcaaaacgaagagtggagacacctattttgaggatgatgaaggacaaccatggcgatgtgccatctttattgctaattctgtatgctatcagatggtagagagtccggagcagttttatcagtcagccagaagttttggtcactttttgaagcagcttggggaatatccggcagaaagtctgtatgaaaccattccgaatttccatcacacggtgaaacgatttgaagcatttgcacagtctgtacagagagacgtgaagaaccgtgcacgcctgtgccgtccggagattgagtttgcgctggcaagggaaaaagactgtggtgtactgatgagtcagatggaggaagggatcctccctctgcgagtgacacacaatgataccaagctgaacaatattttatttgacgcagagaccggaaaaggattgtgtatcattgatctggatacgatcatgccggggctggcagccaatgattttggagattcgatccgttttggagcatcgacagcagaagaagatgagcgggatctggataaggttcatttcgatatcaatctgtatgagctctatgtaaaaggatatctggagatggcgaaagatgtgctgacgccagaagagaagcagagtcttccatggggagcaagactgatgacatttgaatgcggaattcgattcctgatggattttctgcagggagatacgtatttcaagacagcatatccggagcacaatctggtccgtgcccgtacgcagttccggctggtacaggagatggaagagcagtttgatgagatgtgccggatcctggacgcatattaagttggatcccgggggtcctccatttttgagactttgatcagtttgcagtataagaagatttcaagaatgacgataagaagcaggatcattcctgtgatgatcagttgttccatatgttacctcacaaattatagtgataatgaaagtatatccggaaacgaacagttttatgtatgacggaagaaaaattagtcataaatttgtggaataataccgttccagaatagaaagatgtatgttatactaaaacggattgagacgaaagtatgtgattatgggagaatgagaatggaagaacagatgagaaatgatgagatggagatagatctgatagaattgtttcatgtattgctgaaaaaagcgtgggtgattctgttatgtttgatcattggtgctgtggcagtgggcggttataccaaattgtttgttacaccacagtatcaggcaacatctacaatttatgttcttgggaattctgtaagtatgtccggtgtggatatgtctttgagtaagcagcttacagcagattttacagtgctggcaaagagccgtccggtaatgcagaaggtccgtgaaaaattaaaagaggaatatgagtatacggatgtggattattctgtagaacagctgcagagtatgatcactgcagagaatccatccggaaccagtttgatgcggatgacggcgaccaatgcagatccgcagcttgcggcggatatggcgaatgcagcggcagatgcagtggcagagcggatttcagaggtcatggtgatcgacagaccaagcagtgtggaagatgcggcaaagccggcatatccgatcagcccgaatgtaaagaagaacgtgatgatgggaggtttgatcggagcagtacttgcagcgggagtatttacattattattcttgatggatgatacgatcaaatcagaagaggacgtcagaagatatctgaagttgaatacactggcagcgattccaaaggaaaagaagagaagacgtgcatcatcagaggcatagaagagagtacacgaaaggcattgtggggaatgttccggaaggacgtcctgcagtgcttttctttccattatagtagaaagaaggagtgagtctatgaaacgatcccgaagggttttgatcggtattttgctgtgtgtgatcattggaagtgtatcttatatcggatattactactggacacagagtaagaatgagaaagtctacaaagaaatgcagaaagaggtcatcaaaccggagcgtgtgaaggaggcggatccggaagtggcacaagtggagattcccattgattttgcacagctgcaggcacagaatccggatatttatgcgtggattcagatcgagggaacgaacatcaattatcccattgtacagagcgctgtggataatgaatattatctgaatcataccgtcgaagggcaggaagggtatccgggatctatttatacagaaaactggaatacgaaagcatttacggattttaatactgtgatttacggacatgatatgaaggacggcagtatgttccagaatcttcacaattatgcagatgcatcatatatgcagcagcatcctcaggtggtgatctacacgccggagaagaagtttacatatgagatttttgcggcagttgtttacgatgacaggcatgtccttcatagttttgactatgcgtttgcggatcagcgacaggcatttctggattctatttataatgccagaaatctggggaatgtgatccgtgaggatgtttctgtgaatacagagaatcggatcgtgacgttgagtacatgtatgacaggacaggatgacaaaagatttttagtggaggcggtattgatcagtgaagaagacggaagataaaacaaagagactgctctttattctggcagtgcttgctgtcattgcggcagcgggagcgatttatgtcggggtgcagagcaaaaaggcagaggaaaaaagagaagtgtcggcgaataccgaaagtacagacagttcttcgtatattacctacaatggaaaaaagtatcaatacaattcggatcttcgcaccatgttgtttctgggagttgataaagatgaagttgtgacagtcagagagaatacagggcgcagcgggcagtcagattgtctgatcctgcttgtattggatacggagaacaagacgacaacgcttctggagatatccagggattctatggcggatgttaagatctatggaatcgatggagattatatggcaacagagactgcacagatcgcaacccagtatgcatatggggatggagagaaaagaagttgtcagctgacaagaaatgcagtgtcgaatctgttatatgatatcccgatccatgattacctgtcgctgaatatggcggggattgttccgatcgtggatcagatcggcggagtgacgatcacgattacggaggatcagactgcgatcgacccggttttggtatccggtgcgacagtgacaatggatggaacacttgcagagaagtacattcgaagcagagacacgtctgtgctaggcagcaatgagcagcgtatggaacgacagacgcagtttgtacaggcacttttagagaagataaaatcaacggaagatggcggaaatgccatgctgcatcagttctggcaggcaggacagccgtatattacaacggatctgagtttgaatatgttggaaaaaatatcttcctatgatatggatccgcagattttgaaggttcccggagaggtacaggcaggagcagagcatgacgagtttcatgtagatgatgcagagctgcaggagttgatcattcgtattttttacagagaagtgaagtgacaggattcatgaaagcatttttagaaagtgtagaacgcgacgtggaagctgcatttgtatacattccgtatggtcttgcagcggcagctgtgttcttgtgtgtgatggtcttgtataacaggcagaaatatggcagaatttcttttctcataaagagcagtcttttgatcgtgtatgctgttgtagtggggtatctgacattgttttccagacgatccgggattgtggatcgtgtggacctgacgtttttcagtcttctggaagagtcatcggactatgagatccagttggctgaaaacgtattattgtttgtaccggcaggagttttatgtccctggatgtggaagaggatacgaggctggaaatgtagtcttgtgtttggatttgtgttgagtctgctgattgaaacaacgcagctgctgacaggaagaggtctgtttcagatcgatgatctgctcaccaatgtggcagggatgatggcaggatatggaatcggttggatggtaaagaaattatggaaaagggtttacaaattatagattcagtgatattctaaaaaagtatagaaaattccgcataaaagggggaagagcattatgagattgaaacgatttataagcgcagcagcagcggcggtattggcgttatcattaagtttgacagcatttgcagctccgtcagcaactatatctggaattgttacagcagatgcaaaggataatggtatagatggaaatgggaatgtgatcacagcaacattatctgacgtgcctgcagagtatcaggcggcagtagaagaagtgagaagacaggagacattgaaagaactgttgggaagcgcatacgtagagacgatgtcggttgtggatgtaagagatgttacagttccggatggaacggtatttccggttacgattcgattcaacgtaccgggtgtaacagcgagcacgaaggttgcagtacttcactatgacacagagaaaaaggcatgggaagttgtagagtccaaggcgggacagggaacgatcacagcaacatttacatcgttgtcaccagttgcgtttgttgtggataagagcacatctgcttctacaacatctcctcagacgggagaacattctatggtcgtattatttggagcagctgcagtagcagcagcttgtggcgcagttggattatccagaaagaaaagagcgtagtcacacatagaagtttaatcctcttctgcataacaggtcagaagaggatttctttttgttatggaatctattggcattcaaaagaaaggcagtcagcgatgcagggtttgatcgatatgcattgtcatatcgtcccgggagttgatgatggagcccgggatttgtatgacgcagcaaagatattgcaattagaatatagaaatcatgtacaggcagtgatcgtgacaccgcattacagagcagggatgtttgagacatcgcaaagagagattgagcggcagtttcggaagatcgatgagatgacccggaggtctcgttccgggatgcgggcatatctgggatgtgagtattatacgagtattcatatggtagaggatctgaagaaagggatgcgtcctacaatgatcggtacagagtacgttctggtggagttttcgcagcgtcataactatcagttgatccggaatcagatttatgcgctgttagctgccggatatcagcccatcattgcacatgccgagcgatatccgtgcctgatgaagacgccggcactggttcaggaactggttgatatgggggcgcagatacagcttacatcaggcaacgtgatggggaaaagcggatggcgtcagaagcgattctgccataagatgatcgagagaaaccaggtacactacattgcttccgatgctcatgatcagatagaacgaaaaccggaccttcttccgtgtgcagagtatgtccgtaaaaagtacggacagcagacggcagaacggctttttattaaaaatccgtccaagattataaaaaagagcaaaaaaatgcaagataaaaggagaaatcaatgaagcgagttacgttaaagaaaaaagagctgtcatatgcaatgacagaagaattgaacacacttcgtaccaatattcagttttccggagtggataaaaagatcattgtgatgacaagctgtttatccggagaaggaaagtctacgatcacgtatcagttggcaagatctcttgcagagcttggaaagcgagttcttttgattgatgcggatatgagaaaatccgtgatggtcaatctgctggaaacgggaaccgtagacaaaggattgtcccattatctgtcaggacagtgcagtctgtcagaggtagtgtatgcgaccgagaattccagacttcatattttgtttgcaggtccggtccctccgaatccgacagaactgttgtccggagatttgtttcaggatacgctgaagtcattccgtgatatttatgattatattttcattgactgtcctcctgttggaatggtcattgatgcagcgattgcagcaaagtattcggacgctgcgatcatggtcatcgagtcaggagaggtgaagaaaaagctggctcttgaggcgaaagaaaagctggaagcagcaaactgtccgatccttggagttgtgctgaataaggtcgagcgcagaggaggcgcatactacaaaaagtattataaaaagtatgagaaatatgaagaagccacgaaagtagaaggatagattatattcgacatttttcgtacaatatgccgaagaagttctggaataacggaatttcttcggcattctgttgtttttcactttctttttaaaagtagataaagtataataaaactatacgaaaaaatagcagctgtgaggtgggattatgggaagacagaaaaccgtacaaaagaaattacagccatatgaaatcggagaattagatcaatatcttttcggacagggcacacattatgagatttttagcaagatgggtgcgcacaaggccgtacgcagaaaaaaggaaggtgtgtattttgcggtgtgggcgccgcatgcagccaaagtatccgtagtaggtgaatttaacgagtgggattttgaggcggattatatggagcggcaggaaccactggggatttatacctgcttcgtgccgggagcgcaggaaggggatctgtataagttctgtattgagacacagacgggagagcgtatttttaaagcggatccatttgcgaattatgcggagcttcgtccgggtacggcttctcgtgtaacagatatttccaacctgaagtggtcggatgatcagtggatggagaagcgcaggaagtgggatcacaagaagagtccgctggcaatttatgaggtacatatgggatcctggatgcgtcatccgggaacagaagatgagggattttatacatatcgtgaatttgctcattcgattacagactatgtgaagaagatgggatatacgcatgtggaactgatgggaatcgcagagcatccgtttgacggttcctgggggtatcaggtgaccggatattatgcaccgacatctcgatatggtacgccgcaggattttgcttatatgatcaattatctgcatcgcaatggcattggtgtgatcttggactgggtaccggcgcatttcccgaaagatgcacatgggctggcagactttgacggaacgccgacgtttgaatatgcggatccgagaaagggtgaacatccggattggggaactaagatttttgattacagcaagccggaggtgcagaatttcctgattgccaatgcattgttctggatcgagcattatcacgtggacgggcttcgtgtagatgcggttgcatcgatgttgtatctggattatggaaaacaggatggacagtgggtgccgaaccagtatggcggtaatcagaatctggaagccattgcgtttttcaagcatttgaacagtgtggtacttggaagaaacaagggtgctatgatgatcgcagaagagtctacggcatggccgaaagtgacaggagcgccggaagatgacggacttggtttcagtctgaagtggaatatgggctggatgcatgattttacagaatatatgaagttggatccgttgttccgtaaaggggcgcactatcagatgactttttctatggaatatgcatacagtgagaattatatcctggtgttgtctcatgatgaggtggtgcatctgaagtgttcgatgctcaataagatgccgggacttggttttgataagtttgccaatctgaaagtggcgtatgcatttatgatgggtcacccgggcaagaaattgttgtttatgggacaggagtttgcacagcttcgggaatggagtgaggagagggagcttgactggtacctgctggcggaggagccgcatcagcagattcagaactggtatcgtgatctgcttcacctgtacagacgcaacaaggcgctttatgagctggatacggatccggaaggcttcgaatggatcaataaggatgatacgttccgaagtattttcagttttgtgagacattcgaaagataataaaaagaatctgttgttcgtttgtaactttacgccgatggagcgtccggattaccgggtgggtgtgccgcgcagaaagcagctgaagctgattttggacagtgatgatccgcagtatggaggaaaaggggcagcacgtccgcaagtatataagccggtcaaacaggaatgcgatggacagaagtattcgatcgcatacccgctgcagccatacggagtggcagtatttgagttttaaaaatctggaattgtaagagagttcttggagacagtgaatttataaaagtaattgaatagtatggatagatatgggggctgtcgctttaacgattagcaaatcgtgaagcggcagcttccttttttctgattttcgctatatagttgctctgtttctattgaaacgatagctttttcgtaaaaaagccgtactttaatacaatccaaaactggatttgaaaaaaatttcggattctctaaatttatgcactcttcaaaggaaataaatgccttccagttttccctttttggattttgttatgaagtttatttacattttttgccattgccagcaaaacactttcagcaagaacattcgctgtgccacgactcaaatatctgcgaaactgcatatcctgtttcagttcaccaaaagatccttctgcttggatgcttctatttattctaagaagaattccttcgtcagaaagaatccgctccaaatcttcctcccgatatttcaaaaatgtttttgctacggaaagcactttgtttcgctcttctattggtgttttacagttattccccttgatgcactctttcttgtaaggacaatctttacattctttacattgataaatgtttttttcactgatatatccagttttagatttagagcgacggagatgtgtaaagggcagctgtttcccatttttacaaatataagagtcacttttttcatcatacttcatattttctatacggccgatgtcgtttttatattttctcttttttgatatttcataattcgatggtttgataaatgccaactgctgattttgatctagaaatacataattctcttcactttcatatccagcatctgcaatgattttttgatacttaaatgtcagatattcttctgtttcctttaagaagggaattaaggtggtagtatctgtgggctgtggtccgattgtcagccatacaatgtattcagaatcaactccatgctgtaaattaaatgctggctttaactgcccatttcccattgcatcttctttcatccgcataaaggtggcatccggatcggttttagaataactgttcctttttccacaaatatgcagtttttttgtatatccttttaaacggtccagatagtcttctaatgtttcgatactcttttgcagctgagtttttcgtttcccaataccatgtacaaatacaatgttttcttcttgttttaatgcgtacagctttttgcgtaaccgttttacgtgtttcattttaacagtatcaccgtgaacaatccgaataccataaagttgctcacattctgcaatgagatcggcgattttaatcagcaacttcgcctgatttttggttaccgtctttttccatacaaatgtatatttattggcgcaggcttcgatttttgtaccgtctataaaaatcgtttctcccgaaatttctccaagtccgtaaaggagattagacatttcagcgagaattcgtttcgcacacggagcaaaatgaatacttcggaaacgggcaaaagtggcatggtcaggaactggttttccctctaaaagatacatgaaattaatatctcgcttacagttcaattccatagagcgagaggaataatcaccattcatataggaatataaaacaatcttcaagagtgttcttggcgatactgtatttattctttcataagtagaatataagtccgttaaatccatagcctccacaaactgactcagcaaccgcacagaatcatctactggaataattgtttctaagtttaaaggaagttttagttgatatccttcctcattcaaagtataattcttgtgtaataatataggggtttgcatacttatattttacaccaacagccaggcttttcgaagcctggctgtaattttttgcatagaaaagaggctgcgcactaattatttagtgcgacagcccctaattttatgttacgttggaaagagtaaagtatatttcaatacagagtatctatttgatttgaattggtaaatatatacaaaaaatggaaatataagtgatataaaacaactgtaaattgttaaaaaataaaaaaaaaacaaagagcttgaactaaaaaataaatagtttaaaaatataaaaaagccaaatatctacaaaaaatagacaaaaatcgggatgcaaaatacgatgaaaaataaaccgttcacgtaagaaatcgttaccgtttacgaaaaagtggtatgattcagccatgaaaaaggaaaggacgtaagagcagatgagaaaggttgcatttcataacggctggacatacaggcatgcaggagagccgggaaagggaagggcggttacgatcccgcatgatgcaatgctggatgagaagcggacgcaggcaagcatgggaggcattaatgttggctggtttgaaggatttgactatgtgtatgagaaagaattttttgtaccacaggagtacgaagagtttcgattagtctttgaatttgaaggtgtctaccgtaatgcggaggtatatctcaatggaaaaaaagcaggatttcgtccgtatggatataccaatttttatgtggaggcaaatgagttccttcgttttggagtggaaaatcatattcaggttattgcacataatgcggatcagccaaatagcagatggtactcgggagcggggatttatcgcccggtatcgttgtacatactgccaaagaagcacattgctgtcaatggggtaaagatttccacagttaaaatctgtccgggagtgatcgatgtaaaggttgagacatctgcacctggagaactggagttggaaattttcgaaggggagtctccggtatccggtcaggaaccgatcgtaaaagcaaagcagtctgcagacggaacgctccagatgcagttggagatcccaaatgcaaaattgtggagtacagagtctccatttttgtatacatgcagggtacggtttgaagcagatgaaatagaggaagtatttggaatccgtaagattgaatggagcgcagagaacggatttttgatgaacggcaaccgggtaattttaagaggtgcatgtatccaccatgataatggtgtacttggcgcctgttgttatccggaggcagaggagcgaaagattcggatcttaaaggaaaacgggtataatgcaatccgttctgctcataatccgtgttccaaagcacttttggatgcctgtgacagactgggaatgctggttatggatgaatttgtagatgtgtggtatatccacaagacagagtatgattatgtggattactttgcaaaatggtggaaacaggatttaaaagatatggtggaaaaggattacaatcatccctcggtgatcttatattctacaggaaatgaggtatctgaaacggcgcaggagagagggatccggcttacaggccaaatgacagaatatctgcacagtctggataagacaaggccggtaacctgtgggatcaatatcttttttaattttttaagttctattggtttcggtgtttacagtgacaagaaggcgaaaaaagaagcaagccgatcgggtgggaagaaaaaggcagtaggaagtgagttttttaataatctggcagggcttttaggcagtaaaacgatgaagatcggagcaacgcttcatggttgtgatgtaaaaacaagagatgcgtttgcgaatatggatattgcaggatacaactatggtatctaccgctatggaaaagatttgaaaaaatatccgaatcgcctgattttgggaagtgagacattttgttcggatgcatatgctttctgggagatggcgaaaaagcatccgaggatcattggagattttgtgtgggcaggaatggactatatgggagaagtcggtgtgggtgcatgggaatacaccgattatgcgtcggatttctcacatggagcaggctggatcaccgcagggagcggaaggatcgatctgaccgggaaaccgttggccgaagccgcttatacgaaaacggcatttgaattgatggaaaagccggtgatcgcagtttgtccggtcaatcacacgggtgagaagcattctccttctgcatggaagatgagcaatgcgattgagtcctggtcctgggacggatgctctggaaaaaaagcacgggtggaagtgtatgcaagagccgacagagtggagctgtttatcaacggaaagttggttggaggcaggaaaatgaaaaatgactgcagaacttcttttgatgtgatctatgaggaaggggcaattgaagcgatttcttatgatgcacagaatcgggaaattgggagaaatgtgctctatacagcaggaaaagaaaccattttgactgcgatcccggaagacaaagaaacagaagtcggaaagttgtgttttgtgagattaaagtatacagacaagaccggaacagtcaaaccgttgaaacggggaacattggaagtaactgtggaaaacggggaactcctgggactcgggaacggatgtccgtacaatgagcgaggataccggacttcgaaaacggatacgtattatggagaggcgctggcagtgatacgggcaggagagccagggacggttggcgtacaggtgtcggacggaaattatgggtgtaatgtacagattccggtaagaaataaagaagaggtggaagaatgctgaaaataagcagactgacagtagaaaatatggaaacaggatgtgtgacggataatcctcatccaagaatttcctattgtctggaaagtgacagacagaatgtaacattaaaaaaagcggtgatctccataggagactgggagaaggaaacagagtgtcagatcgcggtgccgtatgagggcagcgaactgcagccgttcacaaaatatacagtgtgcgtagaagcggaggatgacgcaggagagtatgcccgggcaagcacagaatttgagactgggcgtatgggtacaatctggtccggacggtggatcacggatggagggtatcagttcaaggaagccaaaatatctccgaaaacgatgacatttcgaactcggttttcctgtgaaaaagaaattgtcagtgcaaaattatatgtaacagcgctggggatttatgagctgctgttaaatggagagaaagtcggacacgattattttgcaccgggatttacatcttaccgaaatcagctgcagtatcagacctatgatgtgacagatatgctgtgtgatgaaaatgagctgtttgctgtggtcggcggcggttgggcagttggctcgtttacctataaaaggcgaaacagagtgtatgcgaaacgacaggcgctgcttggagaactgcggattttgtatgccgatgggaccggtgagacgatcgggacaaatgaagactgggaagttacagaagaaggaaattataaagagacggagttttataacggggaagtgtatgatgccacggtggatctggagaacatttcctggaaaaaggcaagttttgagcaggtgaaaatccatccaaagatcatggcacagtatggagtatcggtgcgtgcacatgaagtgttccgaccgatacagataacaaaagcaaagagcggcatgttgatctacgattttggacaaaattttgccggtgtgatacatgcggtaattcatggaaaatccggacaaaagatcctgtttcgtcatgcagagattctgatggatggagagctttatacagaaccattgagaactgcgaagcaggaggcggtctatatatgcagagatggagaacagacctattctccgagaatgacgtatatgggatttcgatatgtaggagtgcagggaattgaagaagaacaattggagttgaaagcactggcactttattcggatgtggaagacaatggaagtttttcctgctccaatgaactggtcaatcagctgcagaacagtatccgctggggagctaagtccaactttgtagacatcccgacagactgtccgcagagagatgagagaatgggatggacgggagatattgcactgtttgcccctacggcagcttacaattttaatatcagtcgctttctggaaaaatggctgttggatgtgaagtcagagcagaatagaggtggtgggattccggttacggtaccgcttgtccgggttccgatgcagtgggagatcatgatcccgatggcagtggatcactggggggatgtctgtatcctggcaccgtgggcagaatatctggttcgtggagataaaggtcttttggagcggatgtatccggtcatgaaaaaatatatcaaggcatgtaagttctgggcagagttgttttcagcaggaaaacacagaagggtctggaaacttctgcaccactatggagactggtgtgcgccgggtgtcggtatgtgggagtggatgggaagaggaaaatggaccgccactgcatgtatggcaaattccagccggattctggcaaaggtcgcagatatcctgggacaggaagaagatgtgcagtattaccggaaactcagtcaggagactgcagaggcgtatcgggaaattttgatggaaaaagactgtacggtgaagaaagagtttcagacagcatatgttctgcctctgtattatcagatgctttcaggtgaagatgaaaagaaaaccgcagaaaacctggctcgtctcgtgaaaaaggacggataccacattacgaccggatttccgggaacgccgtacgttctgtttgcgctggcagacaatggatatgaagaagaggcatttcaaatgctgcttacggatacctgcccgtcctggctctatgagatgaaggtcggaggaaccactatctgggagcgttgggatgcactgcgggaggacggcacctgcaataccggaaaagaggacggaaccggagggatggtttctttcaaccactatgcaagtggtgcagtgggagattttttataccgcaggattgccggaattgagccgacagaaggaggatatcgttcttttcgcatccagcctcttataggaggaaacctgaaatgggcaaagggaagtgtcaacactgcctacggaacagtttccagtgagtggaagatcgaagatggaatatttacgattcaggtgcaggttccggtcggaacacagtgtacacttgtgatgccggggcatgagaaaaaggtactgggaagcggtacttattcattgaaagaagcaatcagggaaagggatgaccgaaatggaaaagaataaattttttgacagcccgcttgtgcggacaaaaattacttcggcaaacgtaaagccaaaggaaatgctgcttggatattttcttggtccgttttgcgcatttatatcgaatgcaatattcggagcatatttaaatcgctactactcagatgtgcttggctggaccgatactgcaaaatttggtattttttcagcggtacttccaatggtttctgtcatttttgtgattctcggaaaccttctggtagggcggctgatcgacaataccagaacgtctcaggggaaggcgagaccgtatatgctgctgtcggcgccccttgtgacaattgcgatcgcgttgttgtttttaacacctcaggatgcgagtccatccatacagatgatctggatcgcgctttcctataacttttattatgcagtcgcgtatccgtttttctatacagcacacagttctatggtggcactgtctacgagaaactccgatcaccggggaatgttggcgacattttcgaatgcatccggtgtggcagctgtcggaatcggggcgagtatcttagtaccgatgctgctgcagagttttctctttgtggaaaaagatggtgttattgataccacacagagctatcagaactggagactcgtgatgatcgtattgtgtgttgtgacctttctggcaattttgctggaatattatttcacacgagagcgagtgacagaagaaaatatgaagctggcgatcaaagaagaaaagctcccgatgatgaaacagctcaaagcctgtgtgtcaaatggttactggtggattataatcttgtattttctgctgtttcagtttggcggtctggtaaagaatggttctatgagttactattcccgctggatgtttgatggaattacaaatgaggcagctgcgggagccgcaatgggaacattaggtctgatcggtggcattccgacagcaatcggaatggttttggcgtggccgattgcaaataaacttggaaaacaaaaagcagtgaccatcggtctggcaatctcggtggcaggagggctggtcagctttctggacattcacaattttaccattgtatgtatcggtgtgatcttaaagggaattggctccattccggcaatgtatgtaacactggctcttttgtctgacgtgctggaccatctggaggcaaaaaatggatttcggagtgacgggtttaccatgtctgtatatggagcgatcatggtagggatgaccggacttggaaacggactgatcaatgcactgctcacagcaaccggatatgacgcatcggcatctgttcagaacacgggtgtgcaatctatgctggcactgtgctatctgggagcagaattgatctgttatgcggtgatcgtagttctgatgtgctttttgaaggtagaaaaacatattgaagaagatcagaagacaattctggaacaccagaaaaaagcagtgctggaagcaggtgggacatggattgagccggcggaaaggcttcgtatggaacaggaagaagcagagcggatggcagaagaagcgagaatcgaggaactcaaagcgtattgtaagaaaaagggcctggattttgaagcgcaggaggcaagttatcagaagaaactggcagataagagagccaaggcagaagcaaaagctcgaaaaaaacaaaaaggccagttctcataaagaatcaaaaggaggaacgttatgagcgagaaacgggaaaaacaaacaaaatcaaaacgtcgcatctggcggggtgtgactacgacaacagcatctttactgacgctgtctatgtcggcaactctggtaatagacgggtttcgcacggacattgacaagtttctgggtacacagagtaccaaaatggtgacagagaacgtaagcgctgaggattacacatttcagtcggattacagttccacaacagaacttctggatgctattgaagatttgggagaacgtatgaatgaggaaggttctgttcttctgaaaaatgagaatgccgcgcttccgctttccgaagaggaaacacagaaaatttcattgcttggattcagcagttattatcctgtacaaggcggagattttggaagtagtttaagtgacaacaaaggtactgatgcggatactgtagatatgctggaagcgtttgaatctaagggctttgagatgaatcctacattaaagaagatgtatcagggcctgaaagaagagtttaagtcagaggcagttcttccatggggagttacaacatattatcgcgcaacagcaccggccaccaccggagtatttaccagtctggaaccggagacagcaacgctggatgaggcagaaccggaatggaaaaagagcatgaatgattacaatgtgatgatcgtgacacttgcccgtgcagccggagagaatgccaactatacaccaggagaagaaggggtcaatccggagcaggacctgaaccaggcagatcctctgggactttcagatccagaacgtgcgatcattgatgaggcagtaaaagccaaaaaagagaatcatggaaaagtgatcgtgcttttgaacaatgcaagtgcaatggaaattgaagaaatcaaaaacaatacaggtgtagatgcgattctggaagtcggacttccgggaggctatggtttctacggcgtggcagatgtactcagcggagaagcaaatccgtccggacatcttgcggatacatatgcagtggataattccagttctccggcagcccagaattacgggaactatgaatggacaaatgcggattctgcatattccatcaattccgaaattgtagaggcggaaggaatttatacaggatataaatattacgaaacaagatatgcggatacagttttaggacagggaaatgcttctgataagaccggaagctccaatggaaaatcatggaactatgaagatgaagtttcgtatccatttggatatggattgtcgtatacaacattttctcagacgctggatagtctggatgtagatctggaagacaagaccgtgacagccaaagtgacggtaaaaaataccggagatgtggccggtaaagatgtggtacagctgtatgcgtctctcccgtatacggaatatgataaagaacatgcggtagaaaaagcagcggtacagcttctggattatgagaaaacagatgtgctgcagccgggagaatctgtaaccgtagagattacagcagatgcacaggatatggcaagttgggacagtacatgtgacaatgcggcagggacaaaaggaaactggattttagatgcaggggattattattttacagtcggtaatggttctcatgaggcggtcaacaatgtgctggcagcacaggggatgacacaggcaaatggaatgacagatgcaggcaatgcaaacaatgtgaagacatggacactggaaacactggattctgatacgtttgcatacaccaacaatggaacagctgtagaaaatcagttgcaggatatggatctgaattactatatgccagatacggtaacatatttatcaagaagtgactggaaagcaacctggccaaaaacgtataaagatctgacagcgacagatgaaatggtccaagtgatgaaaaatgatctggtagagatcaaggaacagggaaatccggaggaagtgacatttggcgcagacaatggactgacgcttgcaagtttgaaaggtgagacagatctgacagatgaaaaatggacagacctgatcgatcagattacactggaagaagcgatgatccgcaccggatttggcggaaccagtacaaaatcgattgtatcgatcgtgtctccggaggcagtacagaatgacggaccgaatggatttaattcttatacattgggacagtatgccaatacagatacagaatctgcagatccgtatgtgatcgatccggacgataagaatctgaattacaaattcggaacgatgagtaatgaaacagtgatcgcgcagacattcagtaaggagatggcagcagaatacggagctgtgatcggaaactattccatctggtcaaaccttccgattctctggggtgcaggaaccaatctccatcgaacaccttacaatgcaagaaatcacgagtattattctgaagatgcaatcttgacagcatatcaggcagcatcttacattgcggcaggaaaagaatacggatgtatcatggcaccgaaacattttgcattcaatgatacagagatcaaccgttcgggtatcgcgacgtttatgacagagcagaaagcacgtgagaatgagctgcgtggaacacaggcaagtgtggaagatgcacagacacttggtatgatgacaacatttaacagaatcggctgtaccgcaggaaatgcacattatggtcttttgatgaacattctgcgtaaagaatggggattccagggattgatgtctgaagactttatccaggatgcaaactacagtgtgttaaaagaagcagtacattgtggtgtgacaatgacttgtaacacaggggacaataacatggaagcagtgacggcaaaatgggagtactggacaacagagtcagtcagcaaagatgcagtcatgatgcaggatctgaaaaatgttatgatgtggcagaattatgcgcttgcaaattccaacgcaatggatggattgaatgagacttcacagattaaggatgtgcgtacatggtatgataatgcattgacagcaacatcggcagtgttggctctgcttacactggcagcagctgcgatgtatataagagatgccaagagacgtaaaaacagttaagggagggtatgttatgaattttatcaaaaaacaggctgcaggcttttatctgatgctgcttgcactgattctcggaacagcaggaatcgtattttatgtgatcaactgcaacacggcatatttttccaatcttggaatcagctggggagttgtaggatgtcttgtggcaggagtggttctggaaattctttttgtggccggacaggaaaagtcgccggaactgccggtactggatattcttccgattctggcgggagtgcttttgatggcaggatttgtattttttgtccgcctgagagtgaacagcattgcgactattttatcatttgaaagaaatgcgcagactatggcggatttgtccagtgcgatcatcggaatgggatgtactctggcagcagttatcatgacgattatctcttcatttttcagaacagtaagagaggaaaaatagagaagagtgaagggtgtcttattacaggcacccttattttgacgtttgaaaacaggcttggtatactaagaaaaaacaaccgataaaaacagttgagaggagacgaaacaatgattcgaattgcactggtagaagatgatccggcgtatgcagagcagctgctttcttacttgaaagaatacgagaaggagagtaaagagaggatcagcgtacagacattttcggatggggaagatattgtaacagagtatcgggcagactacgatattatccttatggatgtggaaatgaaatttatggacggcatgtcggctgcagaagaaatccggaagatggataccgaagttgtgattatttttattacaaatatgccgcagtatgcgatacagggataccgggtggatgccctggactatgtattaaaaccagtttcttattttgcgtttacgcagcggatcgaccgtgcactgacgagactgaaaaagcgggagaagaaatatctgacgattgcagtgaagggcggtatgatgaagttggatctttcggagatttgctatgtggaagtgcaggatcatgatctgatctatcacacagtcgggcaggattacagaacaaaaggcacgatgcgggatgcagaggaaagtctggcggatggtatgaaagaggagcggtttttccggtgtaaccggtgttatctggtgaatctggattttgtggaaaattttcaggggagtgacatcaccgtgaatggagactgtattcaggtaagccgcgcaagaaagaaggcatttttaaatgcgctcaatgattttatgaatgaggtgggaaaatagatgagtgtgcaggaaatgatcaatactccgggatattattattcgctggcatactggctggcagcgttcattgtgacctgcacgaatgagaagagaatccagggtataaaacgatatgtgacacatctgatatttctggcagcaatcgtggggtttatggagattacagatggtgtgaggaccagtttgtttcttccgtgtatgttggtgtcggtttctctgtttttgatctatatttaccgatgctgtcagttttcacttgccgaggctggctattattgcgcgcgagcatttatcagtggagaatttgccgcatctttcggctggcagatttattattatgcagtgaagacatttcagatcaatcatgtgaaaagtgtccagtgggtgctccttgtgatcgtgtatgcagtgatatttggaattttatatctgctggaaaagtatttgcaaaagggcggcaaagagatgcatatcaaccgaagggagtttttcacggttctgattattacggcggcagtatttgcggtcagtaatctgagttatattgataaggatactccgttcagcagtcagtttgcggcagagatgtttatcatccgaacgcttgtggatctaagcggaatggcagttctatatgcgtaccatattcaggtgcgggaactgcagatgaaatttgaggtggatacgctgcagaatattttgcagatgcaatataagaactatcagctttctcaggagagcatagagattgtcaatcagaagtatcatgacctgaagcatcagatcgcacttttaaaatccgaggctggcagtcagaaatcggtagagtatctggaaaagatggaaaaggaaattaagatttatgaggcgcagaacaagactggtaataaggtgctggatgcggttcttacgagcaaaagcctgtattgtcagaataatgggattgggctgacatgtgtggcggatggaagtgtattaaattttatggaagatatggacatcagtgcgttatttggcaatattttggataatgcgatcgaaagtgtggaaaagttgagggaacaggaaaaaagactgatccatctgtcggttgcaaagcagaaaaattttctcaggatccggtgtgaaaattattgtgaggagtcgttacagtttgaaaatggaattccggtcactacaaagaaagaccggcgctttcatgggtttggcatgaagagtatcaaaagcactgcggcaaaatacggaggttctgtgacaacggatttgaaaaagaactggtttgaactgcggattctgattccactttcctgaaaaagtgtttgcggagcaggcaaaacagagctacaatatgaagtaaacaggaaaggcattggggaagagaaaagatgccggacaggagagcttatgagtatcgaaaaaacaatatttggaaccacaaaagatggaagagaagtaactgcctatacgctgcgcaacattcggggaatgcgtgtgaagatcagcagtctcggagcggcaatcgtatccgtggagatgaaagattttgcgggagagcgcaaggatattgtgcttggatatgacaaagtatcggattatgaagagaacggaacgttcttcggggcagcagtcggacggggggcaaaccggacagaaggcgccggatttgtgctggatgggacagagtatcaccttccgaaaaatgagggggagaataatctgcacagcggaccggacagttatgcattccggctctgggactgcgtaaaagaggaagaggacagtgtggcgtttcatctggacagcccggacggagatcaggggtatccagggaatttttccattacagtgacctatactttgacagataaaaatgaattgaagattcactatgaaggggagtctgatcagacaacgatcgtgaatatgacgaaccatacatattttaacctgaatgggcataactgcggcagtgtgagacgtcactgggtgaagcttctggcatctgggtttacgccggtaaaagagaccggttcgattccgacaggagagatctggccggtggaaggaactccgatggattttacaaaaggaaaagtgatcggagaagaactggcagcagattatcatcagatgcgtctggtcaaaggatatgatcataattttgttatcgatgactgggatcagacactgcgtaagatcgcagaagcagaaggagaacagtccggaattacgatgaaggtgtatacggatcttccgggggttcagttttatactggaaatttcctggagggggtccggggaaaacgcaatatgatctatcatgacaattctggtttctgcctggagacacagtattatccgaatgcggcaaatgagaaaaatttcccgtcaccgatattgaaaaagggcgataagtatgacacgacaacgatttatcagtttggagtgcgatagaaaatttagattataaaagaattgacgaaagaaaatgagagaggatactgttaacgaatcgatcaaacgttaacagtatcctctttcagcagttatatcatgttcattcagaacgaaagtatcctctgtttatacggtatcattcctcttgatatatccaggattttccggatctgcgatgatctcttgtgcatggatcagttttgcacgtttatccacgacttgattttcaacgtgaaccccttccccgacatatgcacccggaagaagcacggtattttttacaacggcgccatttttaatgacacatccacggccgatcacggaattctccacagtacctccgatcaggcatccattggatatgaaggaggacttaacgtcagcagtatcaaaatactgggtcgggcaggagtccgttgttcttgtgtaaaatggccagctgttgtcaaacagaccgaaagtggatttgaattctttaaaatccaacagagaaaggttggcatcataatagcttttcagatccgtgatcggtgcaaagaagccacggtgagaaactccacggatatccagatcgctgcaggcaatattgacaatctgcggcaatgtatacatagaagacatctcatgaccttttgtgaccagttcgatgaacagatcctttttcatgatataggtatccatgaaaatatttcggtttttcgcacttccccggttcttctcaatggaaagaacacctttctggcggttcaaattcaacaggtcgcagttcagatagtgatcctttgcattgtcaacagagtggtacaacagggtaatatctgcacctgaatcaatatggttctgcagcagggaatcaaaatctacggaatagacgatataacttggagcaatgactacataagggcaggatgtatcttcgatacattccatgttttctatgtaagctgcgatttcgttgtcgtagatgctgttttctgttccattttcagaaaagaggattcgtacttttccgcttttggagttgatattataatgacgtccagttccgatatgttctacaagagaacgaggtttgtggttgatatatacctgaatctggtcaatgccgctgttgctcatgttagagagcggaaaatcaatgacgcgatatcttccgaggaaggacatggcaccgatcggacggtaagactgcagtccttttacccagatgtgatttccggaaaaattgataattcctaatgccttgctcatattactctactcctttcacacgctttgcaaccagctcaatgtgttcgctgtctgcactgccgactactgcattctttccgatgcgtacgccatccgcaaccagagcacgctgtacaacagctccggcttctacgatgactcccggcatcagtacgctgtcaatgattttcgctccggtgtcgatcttggcactggtaaacagtacggagtttttaatctctccatcgatcatacatccctgagtgataaaggagcgcttgatgtctgcatttggtccgatgtagtgaggtggtgtcgtggtatcttctgtatagatcttccaggaaggatcatgcaggttcagttcgttgtttttgtccagaagatccatgtttgcttcccagagagaatcgatcgttccgacatctttccagtaacctttgaacttgtaagcgtacagactctttccgtcatttagcagtgtcgggatgatatcttttccgaaatcgtggttggaatcagcgttcttcatatccgccagcagcatcttgcgaagcagtttccagttgaaaatataaattcccatggaagccagattgctctttggatgttctggtttttcttcgaattctacgattcgtccggattcgtccgtattcatgattccaaagcggctggcttctttgatcggaacttcgatgactgcgatcgtagcatctgcgctgcaggccttatggtaatccaacatggcagcataattcatcttataaatatggtctccggacaggatcaggatatactccggagagtaggaatcgataaagtcgatattctgagaaatggcatccgcagtgccgcggtatacatccagatcagaatctgccttttcacgaggtgggagaacatagactccactttccttggcatccagtccccagcgtctgccggcagcaacgtagctgttcagtaagattgattcgtactgcgtgagcacgccgacagtgtcaatcccactgttggcacagttactgagcggaaagtcgatgatacgatattttccgccgtatgaaacagcaggttttgcgactttatttgtcaggtcatgcaagcgggtaccccgtccaccggccaagatcattgctaacatattgttttgcttcatagtgaatcctctctttcataaacttttatatattatacaatttttattgacatatttccataattatgtgcaaaatgttgcaaaaaacataaaaaaagttaaaaataaattgcaaacatcccaggaatgaagtatgctgacaaatggaatcaatggagaagaacgagaatagaggtgtaccgtggaagtattggaattttggaaggaaatttctttgatgccggaggctgtccggcagttggaagaacagaagattacagaagaagaatatcaaaaactgagggagatattttacagagatcttgatttattttatgaagaagtgaaacaaagaaaagattttcgacgggtgtttttgtattgttattcgaaaatggcatgtgaggtgtatgaccggtattgtgaacgggggatttcgagacagatttatcgggatactttttatgatctgacgttgtggtgtgagaattgttacaaagcgtatggagaatatggaattgcacagtacgactggttttccagacatctgaatctgcgtctgttccgattgggacgcctgcagtttgaaaggatgcagtctttgtgggacattcagaccaggcatggggcgatccgcagaggagatcctgtgatcagtgtacacattccccagggagaacggctggatgttgcggcatgtcgggattcgtttgaacaggcagagcggttctggggagagtcggatggatatctttgtcattcctggcttttatatcccgggcttcagaagattatgaagccgggatcgaatattttacaattccagaaactgtttcagatcgttgcggaagattttgagacgcgggaggcagaagagcggatttttggggaagtggagatgaatccggaagattatgcagaagataccagcctgcagagagcagcgaagaagtatctggtatccggagggaagcttggaagcgggcttggaatatgggagaaggaggaataagcatgaatagagaagaccagatccacacatgggttgaggagcacacagaagaattgaccgagacggcggattttattttccgtcatccggagctttccaaagaagaggtgatatcttctgcacatcttgcatcttatctggaggcaaacggatttcgtattacaaaagggatagcagatcttccgactgcatttgctgcagagtggggaagtggaaaaccgatccttggatttctggcagagtatgatgcgcttccggggcttggacaggagccggtctgtacgcatcagccgctgcggacaccgggacacggctgtggacataatcttcttggaactgcgtgtgccggagctgcctgtgctttaaaagagcgaatggaagcggagcattcctcagggacaatccgggtgtatggttgtccggctgaggagatcatcctgggaaagattcagatgaatgaggcaggagtatttgatgatctggatgcggcgatcacctggcatccgtttgaccgtaatcgggtaagttatgatatctggcaggcgcaggatatgaagaactataaattttacggggtcaaagcgcatgcatcgaagcatccggaactgggaagaagtgcactggatgcggcagaattgatgaatgtaggtgtgaattatttaagagaacatgtggcagatgacgtgaggatgcattatacctatacgaatacagacggaccggccaatattgtgccggattttgcatctacgaactattttatccgttcatctaaacgttccagaacagaggatgcatcgaatcgggtggatgactgtgcgaagggggcggcgctgatgaccggaacgagggtggagatcgagcttgtgacgagcaatcaggagatgaaggtgaatcgtccgctggcagaagtcttttatgaggcaatggcagagacggcacttcctgaatatacgaaagaagaactgcagtttgcggaaatgatcacaaaagaagcaggactggtcaatgacgggacgtattttgggggactggagccgttggaggatgaacctgttttactggcgatcggaacggatgtatcggaagtcagtcatacggttccgacagttatgctcagcgcagcaactatgtgcaaaggaacgccgctgcatcactggagcgctgctgcacagtccggaatgagcattgggcagaaagggatgctgtatgtagcagaatgcatggcgaaaggggcactccgtctgatagaagagccggagcttttaaaggaagcctggagggcacatcaggaataacactttttgaaaaaatgcatatggtaatccgggaggtggtaagatgtttgcagagatacagaccattccggatgctgctgcacaaatgaaaggaagccctgaatatccggaaattcagggaatggtatattttttcggagttcacaatggaacgatcgtagcagctgatatcaggaatctgcccggtggaaatgcttttcatggatttcatattcatgagggaggttgtcagggaacaaaggcagaaccatttgcgcaggcggacggacactataatccggcaaataccatgcatccgcagcatgcgggggatatgcccccgcttctgtcaaatgacggaaatgcatttctgattttttacacggatcggtttcatcccgaggatgtgatcggaagagcggttatcatacatgctgatccagacgatatgacaacccagccgtccggaaacgccggcgctatgatcgcatgcggagagatccgggaaatgaagacagaataggaaagggctaatcttccgggcagacatcctttttcaggaacacatactctgtcccggaagaaagagactcttcaaaagcaaatccgagtcctgtaaattgttttaaatctttcgcagtctgaatctgatgttcggccatccagcggaccatttcgccccgcgccatttttgcaagcgtggctttcacttttactttttcatggatccattctccgaaaatacaggtgatgcagtgcacgtcttttgtcagataagggacaattgccctgctgtattctgcagaggcaagattgatgagctcttttggggtatcgtcttcaaattgactgtgcagggtctggtataatcggtcgttccagaattgatacagatcgctgccgaaatccgtctgtaattttgtctgcatttccaggcgataggggatgacagcatcggatggacgcaggattccgtaaaacccagagagaatattcaggtgtcggtttacgtagtcccactgggagtcagaaaaaattcccggtgcgagatactggtattggatcccttcataggcgagaacggcgggggttacagcgtcatccggtgtaaattcacgcagtctctgttcattttgaagagccagtttttcactgcatttccaaagtgtttgcaattcttcaaatgacatctgttttagcgactgatataaaagggctgtctgttctgcaaaaaccggtgtggtggcagtgcatggaaattcttcgcatacattcatttttttggccggcgagataatgatctggatcataaatgatggttctccttttcgaaaatagttgtttttatcatacgatattttcttacggaaagtctaccataacagacagaaaagtgttatcatcaacaacaaaatacaacaaggagttttgaatatgaaaaaaataattttaggatccggttccccgagacgaaaagagttgttatcacagatcggagtcccgtttgaagtacgcatcagcgagaaggaagagatttacacaagtacagttccaaaggagatcgtaaaagaactggcgctgatgaaagcggaaaatgtggcgtccgagatccaggaagagaatgtgatcgtgatcggtgcggatacggtcgttgtgcataaagaacaaattctgggaaaaccaaaggatgaacaggaagcctttgacatgatccggtcactgcagggggatgtgcatcaggtatataccggtgttgcgttccttaactttgatgaaaacggggagaaatcggtgatcagtcatgcggtggagacaaaagtgtatgtcaatccaatgagtgcagaagagattgaaagatatgtggagagtaaggaaccgatggacaaagccggagcatatggaatacagggaaaattttctgcttttattgaaaagatcgagggagactattttaatgtagtgggccttccggtttcttatgtatatcaggtgttaaaagagttgggagagtgataagatgcgtggaagaaaaacagcggcaaattgcgaaagctgtatgaattatgaatacgatgatgagtatgagtgctatgtttgcatgcaggacctggacgaagatgagatggtgaggttcgtgcagggagatttccgggaatgcccatattatcagatgggagatgaataccgggtggtgaggaagcagatgtagggagatcataaatttcgtccattttctctcagccacttttgggctttttgataatcaggcagaacggattctacaatacggtaaaatgctttggagtggttcatttccagacggtgagccagttcatgtacgacgatgtagtccacgacttcttccggtgcaaagatcaggtgccagttatagtttaaatttccaatgctggagcagcttccccagcgggtcttttgctcccggatcgagatacggccgtaggtgacgcccataatacgggcataatattctgttttgcgtgtgaagatgtcccgtgcaagagcaatatatcgttttcgatcatcatcagagatctgaggtctgtcggtggcttctttgagtcgggcagatgcagaatccagatgtttcaagatccagttctgtttttcgcagagaaaggcatcaatagcagaaccggggcagtttctgggagcccggacacggacggtggcttgtgccgtaatctggattgcgatagatttcctgttgctgtagatgatttcatagggaaatgggtgttgcatgagattctcctttgtagtcatgattttcattcagtttagtgaaaatagaagaaaaatgcaaggtgtaattcataaaaagaatggttttggaattgctttgttcctgttaaagagtgtaaaatggattttatagtagaaagcaggttggtatatggttgataaaaagtattttggtgaaggaaagaacattgaatttaaaagagaaatcccgggtaatcatgaaaaatttttaaaagatattattgcattttctaatagtacaggtggaaaagttatattaggaattgaggatgaaacagggaatgtttatggaattggtgagcaaagcccatttaaattgtcagattctatttctaatatgatttcagatgcatgtacaccgcagattgaaccagatatttcgatccagacaatagaagaaaagacgatacttgtaatagatattgttccgggaaagttcagaccatactatattgcaaagagaggaaaagaaactacggcttttattcggattaatggaacaagtagacctgcagatgaaagaaaattaaaagaattagaattggaaggccaaaatatttcttatgattcgttacaagaaatagggaaagaatttgacgaagaacaggcattaaagctttgtgaaaagatgaaaaaaatagcagttctatcttgtaaagcagaagaaaagaatgcagtaaaagatattacgatagagaaactggaggattttgggattctttgcagagtaggaagaactctttatccaacacatgcatttgacttgatgacggataataaaaataaagcgtcaaaaattcaatgtgcgttatttaagggaataatcagagatgttttcattgatcaaaaagagtttagtggaccaatttatgaacaggtagaagaagcatatcaatttgttttgagacatattaatatgggggcggaaattgggggaatatatagaagtgattcttatgaacttccgatatctgctgttagagaaatgattgcaaatgctgttgtacacaggagctatgtagacaagtcttgtatccaagtgagtatttttgatgatagaatcgaggtgctatcaccaggaatgctttatggaggattggacattgaaaccgcaaaatcaggaaaatctacgtgcagaaatgaagcaattgcagaggtatttcattatatgcatatcgtagaagcatggggaacaggaataccaagaattataaacagatgcaaagaatatgatttgccagagccgatatttgaagaatttggtaatggatttaaggttaccatgtttagaaaagtaagcaatgataacagaaaagtaagcaatggcaacaaaaaagtaagcaatgataacggaaaagtaagcaatgataacggaaaagtaagcaatgattttgaaaaatatttacctttatttagagaagcagagattacagaaaaatttattgaaaatagtaacaaagtatttttacaaagtggagtaaacaattcttttggacagaaaaatgttatggaatggctgaattgttcgaaatctaaagcaacaaatgtgatgaatgctatgaaagcagcgaaagtgattgaaaaagtaacgggtgctggcccggggaaatatagatttatcgagaaaaagagcaattcgtgatcagtgctgtttgaaagaatacagaatatcagaaaggaatcgggaatgggaaaaaagaaggagaaaaaacaaaacggttatttccgtcatatggcggaggcaattcgaatggagctgagggaacataaaagttcatttatggtgtaccttattttacgaattcttgtgatcgtgatgctggtactccagattttaaatcagaactatgaaaatgcatttttgtgtattcttacattgctattgctgatcatcccgagttttgtgcaggtgacatttaagattgaactgccgacaacgctggagatcattgttctgctgtttatatttggggcggagattcttggagagattgcagagttttatcttgtgtttcctttttgggataccgtactacatacgctgaatggatttttggcggcagcgatcggattttcactggtcgatttactcaatcggagtgagcgtacggtctttcatctgtcaccgttgtttacagcaatcgtagccttctgcttttctatgacaattggagttgtgtgggagttctttgaatttgggatggaccagattctgggatttgatatgcaaaaggatactgttgtatcgacgatcacatccgtcatgctcaatgcacagggaagaaatgttccggtgaagatcgatcagatccaggaagtcatggtgaatggacaggcgttggggctgggaggatatctggatattggattgatcgatacgatggaagatctgtttgtaaattttataggagcagccgtattttctgtgattggatttttttatgtaaggagcagaggaaagggagttgccggaagattcattccgaggaagaagagagcagagcgggactttttgaaaattgcacgggaaaagtcaaaaatacagtcggaacacaaagaggaaatgttgtcagggaaaagggaataaagcaagaaaggctttttgtatacagaattgtgcgtctgtgtgtagaaagctttctttttttggtgtgaaagagagtatttccacaaacagaaagataagcatttcataatattatggaagtttgatgaaaaaaacgaaaaaaaagacataaaaattagtagaaaaaaattggaagaacataaaaatgacgaaaagtcagtaaaataagtctgaaatattcctaaaaaaagaaaaaaacacattttgaatgactggaaatttcgacaaaaaaagagcagcattgtacgaaaaagagcaaaaattatttttgttgacaaacaaggttgctgggagtaggatttagataactttttaggcacactgtctgaaaaggtgacttttgtacggagatttcaggacatgaaatttccttattttatgctcagaagaggcctccacctggaagagaaaagggaagaccccgaaaaagggcaggaatgaaaaaatagacaggaaaaggagggagcgatacggaaaatttagcaacagaattgatggaagagctgaactgcaaaacagtatttgaacttccggttctcggcggaatttcggagtccgtggttgttacatggatcattatggcagttctggttggattatcgttgattctggtgagaaatctgaaggtagaaaacccgggaaaagttcagttggctctggaagccgcaattggctgggcgacggatttctttgaaggtatcctcggtaaagggaacaaaagatatataccgtatctgatcacagttcttctttatctggcgtgcgccaatatgattggtctgcttggttttaagccgccgacaaaggatctgaatgtcacagcagcacttgccgtgatgagtatgtgtctgatcgaatattcaggaatacacaaaaacggtatgaagcattggatcaagcattttgccaaaccggtaccggtggttgcaccgattatgattctggaaatttttatccggccattgtcgctctgtatgcgactgtttggtaacatgctggcaggatttgtggtaatggaacttttaaaagcattcgttccgctgattataccacttccgatgaatttctatttcgatatttttgacggtctgattcaggcatatgtatttgtatttctgacagcactgtttatgacagaagaacaggaatagaaacggaatttttgaacaaataagagaataaaaaaggagattagaattatgggaacactgattgcaattggagcaggaatcgcagtattaacaggtattggagcaggagtaggaattggtatcgcaacaggaaaagcagtagatgcaatcgcaagacagccagaggctgaaagcaagatcagcaagaacctgatcctcggctgtgcgcttgcagaggcaactgcaatttatggatttatcattggtatcctgatcgtattcttcttaaaataagcaaatagaaattaacaggaaaggcgggtgtgggaagtgctgagatttgatatgaactttctatataccatgattaacctgatcgtcctggctttcttattaaagaagtttttgatcaagcctgtgaccgacattatggaaaagcgccgtcagctgatcgaagacggattgaaaaatgcccagaatgcacaggaagatgcgatgaagatgaaggaagaatatgcacaggcacttggcggggcaaaagaagaatctgtgcggatcgtagagaaagcacgtaaggacgccaagtcagagtatgaccggatcgtaaaggaggcggatgccagagcgggcagtatcatcgagtctgccaaggcagatatccgtgtagaacgtgagcagacaatgcatgcacttcagtctgaaatcgcaggacttgcaatgacagctgcagcgaagatcgtggcagaacaggcaggcaataatcaggagatatatgataagtttctggaagaagtaggtgaagctcatgaagacacagacaacaactagtcaaatgtactgttcatctgcagcaatgcggtatgcacaggtgttgtatgagctgaatgttccgagggaagccatacagaaagcaagagagatatttgaggaggtaccgcagcttcatgatgtgtttgtgaatccgacaattccggcgcagaagaaggaatgtgtgattgacaaggtatttccgcaggaaataagaaatttcctgaaagtggcatgtaaatatgagagaatggatctgcttccggagatatttgctgcatatgacagatattgtgacgaacagaatcagatcttaagtgccgtattgacatgtgtagaactgcccagtgacgagcagctcaaaaatatggaagcgttcctttgtaagaaatatgaagcgagcagagccaggattgagattcagacagacagtacgctgcttggcggatttgttctgcgcacaggaagtgatgaatatgactggagtctgaaaggacgtctggacaggctcggacaaaaattaacctggaggtgaacaaggtgagttcaatcaattcagatgagattatttctattttaaaagaagagatagaaaattttgacagtgtgagcaaagacagtgagataggaaccgttgttgctgtgggtgacgggattgcgactatttatgggattgatcacgcaatgtatggagagattgttaccttcgatacgggtttgaaaggaatggtacaggatattcagaaaaatgaaatcggagtcattctttttggacgggatacagagatcaaagaagggacaaaagtaactcgtacagggaaaaaggccggcgtaccggttggagataaatatgtaggaagagttgtcaatgcactgggagctccgattgatggaaaaggcgagatcgaggcagatgattatcgtccgatcgaacaggaagcaccgggaattattgacagaaaatcagtcagcgtaccgatggaaacaggaatcctttccattgatgccatgttcccaatcggacgtgggcaaagagagctgatcatcggggaccgtcagacaggaaaaacatccattgcgatggatacaatcctgaatcagaagggaaaagatgtaatctgtatttatgtggcgatcggtcagaaggcatcgactgttgcaaaagtggtaaatacattgaaaaataacggtgcactggattatacgatcgtggtatcgtctacagccagtgattgtgcaccgcttcagtatatcgcaccatatgccggaacagcaatggcagagcattttatgtatcagggaaaagatgtcctgatcgtctatgatgatctgtcaaaacatgcggttgcctatcgtgcattgtctctgctgctcggtcgctcaccgggacgtgaggcatacccgggagatgtattctatctgcattccagactgttggagcgttccagccgtttaagtgatgaattgggaggcggttctattacagcacttccgatcattgagacgcaggcaggagatgtatccgcatatattccgaccaatgtaatttccattacagacggacagatcttcctggagagcgatctgtttgcggcaggtatgagaccggctgtcaacgtaggactttccgtatctcgtgtaggtggtgccgcacagacaaaagcgatgaaaaaagcatccggaagtattcgtattgatctggcacagtaccgcgagatggaagtgttcacgcagtttagttccgatctggatgctgcgacaaaagaacagctggagtatggaagtggtttgatggaattgttgaagcagccgctttatcatccgctcagtctgcatgaaaaggtcatcacactgtgtgcggcgacacataaagtgatgcttggaatcgaaaagacaaaaatcaaacagttccaggcagatatgcttcatcattttgattctgagtatccggaaatcggacaggagatcgaagaaaagaaggtgctgccggaagaactgatcgaaaagatcgtgaagactgcaaaggaattcaagaagagcaggtgttagtatggcaaatataagagaaatacagagccgcatcaacagcgtaaaagatacgatgaagatcacaaatgcaatgtatatgatttcctcttccaaaatgacgcaggccagaaaaaagctggcagataccgaaccctatttttatgggctgcaaggagagatttcccgtatcctgcgtcatgtgccggagatccggcatccgtattttgatgccagagagaatattccggcagagcagaaaaaaattggttcgatcgtagtgacagccgacaaagggcttgcaggagcatacaatcacaatattatcaaactggaagaagaaatccttgcacagccggggattcacaagctctttgttgtaggtgagctgggacggcattattttgcaaagcacgatgtagaaatcgacacgaatttccagtacacggttcagaaaccgacgatgcatcgggcaagagatatcggtcagtcggtgatcgatcagtttctggcaggggaactggatgaagtgtatgttgtatatacccgcatggagaattcggtacaggcagatgcggaaaaattgaaattgcttccgttggagaccaaagactttggaagtatgaaaatgcctctgaatatgtatcgggaagcaattgagctgtatccctccgcagacagcgtgatggacagtattgttccgaactatgtcataggtatggtttatggatgcctggtagaggcatatgccagtgaacacaatgcccgtatgatggcaatgaaggctgcaacagacagtgcacagagcctgatccgggaattgtcaatcgtatataacagagccagacaggctgcaattacccaggaaattacggaagtttgcagcggtgcgaaggcgcagaagcagaaaaggaagtgagaatagcatatgaataaaggacgaattgtacaggttatgggacctgtcgttgacgtagtatttgaagatggcaatcttccttatatcaaagatgctctggaagttgaaaacaacggaaagaaatgcatcatggaggttgcacagcaccttggaaataatgaggtgcgctgcctgatgcttgctgccagtgaaggactgcataaggatatggaagtaacagccaccggagcaggaattaaagttcctgttggtgagaagacactgggcagactgtttaatgtattaggtgagacaatcgataatggagagcagatcgaggatgctgaaaaatgggtgatccacagagaaccgccgacatttgaagaccagagtccggtcgtagaggttctggaaaccggaattaaagtaatcgaccttcttgcaccttatgcaaaaggtggtaagattggactgttcggtggtgccggagttggtaagaccgtattgatccaggagctgatccgcaacattgcgacagaacacggtggatattctatttttaccggagttggagagcgttctcgtgagggaaatgacctctggtctgaaatgaaggcatccggggttttggaaaagacagctttggtattcggacagatgaatgagccgcccggagcgcgtatgcgtgtggcagaaacagggctgactatggccgaatatttccgtgatgaacagcatcagaatgtgcttctcttcatcgataacattttccgttttacacaggcaggatccgaggtttccgcattgcttggacgtatgccgtccgcagtgggatatcagccgacactggcaacggagatgggtgaattacaggagcgtattgcctctacaaagaacggatctgttacttctgtacaggcggtatatgtaccggcagatgatttgacagacccagctcccgcaacaacatttgcacatctggatgcaacgactgtgctttccagaaagattgtagagcagggtatctatccggcggtagatcctctggaatccagttcccgtattctggaagcagatgtggttggagaagagcactatgaagtggctaataaagtcatcgcaattctccagaaatacaaagaactgcaggatattattgcaattcttggtatggaagagttgtcagatgaagacaaagcaacggtaatgcgtgcgagaaagattcagagattcctgtctcaaccattctttgtggcagagacatttaccggaattccgggaaaatatgttccgttaaaagaaacaatccgcggatttaagatgattattgatggagagatggatgcatatccggaatctgcatttttcaatgtaggaactattgacgatgtcattgcaaaggcaaatgctgaggcggcggcagaataggagtgtggcatatggatacatttggtctgaaaattatcgcaagtgacagggttttttacgaaggacgctgcagaaagcttgtgattccggcgccggatggagaaaagggaattctgcccaatcatgagaatatggtaatcgcagtgaagatcggaatgggacgtatggaaatcgaggaaggaaactggatggaagttgcgtttggccggggatttgcagaggtagtcaacaaccgtgtgacactgttggtagataccgcggagaaaccggaagagatcgacatccgtcatgcacaggagcagaaagagcgtgcagaagagagaatccgccagaaacagagcattcaggagtattaccattcccaggcatctctggcaagagccatgaaccgattgagagtatctcagggaaaacgctggaatttatagagaaaagaaacaagggagtttgcacaaagggcacaacttccttgtttttttataatacatttatggaaatttcattgtatccatataaaatttcaagtacaataaaatcaatcttgaaaggaatccctttcagttttcaatatggcagaagatgccattcaaaataattcccaaattaaaatgaagaaaagatggataagagaatacagggagtttgtctgcgtttgcgattgtaaaacattctgtcaaaagttataatgaaatcaagatacagctgcatgctcatcgaaacattctggattccatccaaacaaaggaggagcatgtatggagaaagaacaagcaacaaaatttttaatgaagccaaaggtagatttctgttttaaagagttgatggaagacgatgaggtgcgtaatgcattcctggcagcggtgctgggaatagaggtaaaacacattattgagagcaggcttttaccggctcatttgcgtcagaaagataaagatgagaaactggggattctggatgttcgggttttgctgaatagcagggagcagattgacattgagattcaagtgacggccagtgaatactgggcagagcgcacactgttttatctgggaaagatgtttgtcgatcaattaaaaccgggagaagattatcaaaaattagaaaaatgcatccatatcgggattttagattttacaatgtttgatgatgaggaatattattcctgctttcacttttggtcagatcagggaagaaaaatgtacagtgacaaagttgagatccatacattggagcttcccaaactggcaaaacatgattatccagagacagaactgctgaagtggcttcaatttattaatgcggagaccagggaggaatttgaaatggcagcggaaaaaagtgaatatattaagaaagcctatgaggatttgaatcgaatcagtgcagatgaggagaagcgtctggaatatgaagcaagagaacgtgcaattcgagatcatcagtatttttccacagtatataaaaataccggattaaaagaaggcttgaaagagggcttgaaagagggtttgaaagagggtttgaaagagggcagaagacaggccactgtagaattattacaggaaatgggaatggaaaaagagagtgtatgtgcaaagatgcaggaaaagtttcagctttctttaaaagaagctgagcaagaagtggaaaaatattggaagtaataaagatccttaacagccctgttataaaacaaaactataacagggcattgtacattgatattagacatcaaaatcctactatgctaatatacttaaaaggaattaagaaacaaacagattccgaagaaggaggaaatagagatggcagatatcagagattctaaaaactggggatttgagacaaagcagttacacattggacaggaacaggcagatccggttacagacgcaagagcggttccaatctatgcaacaacctcttatgtatttcatgattcacagcatgcggcagatcgtttcgggcttcgtgatgcaggaaatatttatggaagattgaccaatcccacacaggatgtttttgaacagcggatcgcagcgttggaaagtgcggaggcagcattggctgtggcatccggagcggcggcgattgcctacacaatacaggcgttggccaaggctggagaacatattgtggcgtcgaagacaatttatggtggtacctataatcttctggcgcatacacttcctctgacaaacgctgtggccacaacgtttgtagaccctgaggaagaaggcgcttttgaagcagcaattcaggaaaatacaaaagcgatatttgtagagacgcttggaaacccgaactccaatctgatcgatctggagaaggtatcggagatcgcgcacagacacaacattccgttggtggtagattctacatttgcaacaccgtatctgatccgaccgattgagtatggtgcagatcttgtaattcactccgcaacgaaatttatcggtggtcatggaacagcaattggaggcgtgatcgttgacagtggaaagtttgactggaaggcgtccggtaaatatccgtggatctcagaagccaatccgagttatcatggtgtatcgtttacagatgcagtgggagcagcggcatttgtcacttatattcgtgcggtgattctgcgtgataccggagcaacgatttcaccgtttcattcctttatcttcctgcagggactggagacactatctctgcgtgtggaacggcatgtgagcaatgcgctcaagatcgtggagtatcttgcgaatcatccgcaggtagaggctgtacaccatccgtcactggaaacggagtcaacccatgaattatataagagatatctcccgaacggaggtggttctatctttacttttgagattaagggagatgcacagactgcccgggcatttatcgatcagttgtctatcttttccctgctggcaaatgtagcagacgtgaagtctctggtgatccatccggcaactaccactcacagccagtgtaccgaggaagaattgttagagcagggaatcaaaccaaacacgatccgactttcgatcggaattgaaaaagtagaagatctgatcgcagatctggatgcggcattgaaaagagtaaaagaaaacttttgaaatagcagaaaaagataccttcgcacttgagcagtattcaagtggaaggtatcctgtctgttcagaaaattattctaatttggttatgatgacatttggataaatcctttccatgtcatttactgtaaaaaatccagttttttcgttgagtgctgatgcagcagaaagtgcacttgctttttttaacatatcgggtacagtcagttgttctgtcattccgagagcaaatccggcaatcatcgaatctccgcagccaacggtattgactgcgttgatcttgggaacctttgcctgatagattccatcgttgcagactgccaatgctccgtctgcaccgagagaaatcacaacaagctctattccgtctttttgaatttttttagcagctttaatgatttcattcagagtacgacaagcactttgagtaagagcacgaatttcgtccagattgggtttgatcatagtaggagatgcctgaattccggattcaagcgattttccgcttgtatctaaaatgaccttttttccggcctctttggcaatggaaattagtacctgataggtgttttcgcttaaaccctgagggatgcttccggacatagtaattacatcagcgtcttttacaagtaatttaaacttttcaacaaatccgtaaaagtcattttccgttaaagtaaatcctggttccagtagttcggtttgtgtctgagttgattcatcccaaatgttgatgcatgaccgactttctgaattgacatgataaaaggcattttcaataccaaagggtttgagtgcgtctgcgatatagtttccggcgtgtccccccagaaaaccggttgcaactacttttgcaccggcaatagcagcaggttttgaaacattaagtccctttcccccagggacataggtgcattcttttacacgattgacttctccggatttatagtgttctactacatatcgtttatcaatagcagcatttaaggttacagttaaaatcatattcgttactcctgattttcatttattaaaagaattttcccctttacaattcctggtgttttaaacatttcgaatgcttcttgtgcacgattcatcgggaactttttgaaaatgaatgcaggatcaaattttaattgtccggttgcaaaatagtgtgctgttaaatcccattcttttccggggaatggtgcactgtatgacatccaggatccggttaatttaaattctttgcggttcataagttcccatatgcggggtgtaaatgtcaaggtatcgtgtggtgttccgataaaacaaacgtgtgatttatttcctgcaagttcaaatgccatatgcatagtagggatttgtcctgctgtttcaaagatataatcatatcctttgttattggtgacagacagtgctttttcgatataatcttcctttgttgtattgatgacagtatctgcacccagttttttggcaagttctaaacgttcttcacaaatatcaaatacaacgactttttttgagcccaaaatttttgcccattgcattgtaaacataccaatggttccgcctccaaggacagcaacgtaatgtcccccctgatagtcattctgcaatatgccatgaagagcaaccgtagaaggttcgaacattgcagcttgttcatagggaatttttttatcatatacaatcgcatttgattcaggaatcacaatataatctgcattgcttccctgttctcttgatccaataaagctataatgtttgcataaagaaaagtttccgttctgacagtcatcacatttcatgcagggctttaatggaacaccggaaacgtgatctcctatctttattttcgtgacatgttttccaatctctacgacatcccctgaaaattcatgccctaaaacgataggataaaagtgtacaccattatgaagcacacgtgggatatcagaaccacaaattccggaggcctttacccgtacttttacttcaccgggaccaacgacaggctcttcataatctaaatattgtacgtcttcatttgcacaaacaacagctgctttcattttatatattcctcctgtagttcagtttatacttttccattgcagccacacattttcatacgttctatcacctgattcttaacggcatgcattgcagcgcttcccaattttttgggatcaaatgtttcaggacattctttaaataattgtttgatagaatttgtatatgctgtgcggagttcagttgcaaaatttactttacacatacctctttgtacacattcctttatatcttcttcacttaggccactggctccatgaaggaccaaagggacggaaacggtttttttgcagtcagatacacgtattttatctaaaacaggagtgttcgcataaaatccatgggaagtaccaattgcgattgcaagagaagatacgcctgttttttcgacaaattcttttgcctgttgaggatcggtatttgtatcggcttctgtttccagatcatcttcttttccgcctacttttccaagttcagcctctacaggaactccatagatatttgcaatatccactacttttttggtaatagaaatattattctcaaattcttcatgagaaccatcgatcatgatggagctatatccggcctttagagcctgaattgccaattcaaaactatttccatgatctaaatgcagacatacagggacagttaccttttcagattcggcctttgcaatggcagcaaacgtttccagagttccatattttacggtagaaggtgttgtttgaatgataacaggtgcttttaattcttcagcggccgcaagaacggcttttatcatttccatgttttccacattgaatgcaccgactgcataaccgcctttttgtgcttgttctaacatatattttgaggatactagtggcattttttttctcctaaactgttttttctgatttttctgtaaataattgcatcaaaacggcgataatgataattccacctttgataacatcttgcggataagatggaacggccatcagattcataatatttccgatgaaagccagaacaaaagctcccatcactgctttgataacatttccacgacctcctgctaaactggctccgccgatgacacaggcagtaattgcatccaattcctgcccctgtccgatcgtagcacttccggtagacgccctggcagcaataaaaataccagccaatcctgccaagcagccagaaatcgcataaacagaagtcaaatatcttttgacccgaataccggacaattcaactgcggtactattacttccgattgcgattacaatacgtccataaaacgtatatttttggatgaaccaaaataaaagaacaatgagaaaagtcaaaataataataggatatccgttttctttttttacaagaaagtctaaggttcccttatccaatttgacaggaattccgtcagttaacataaatgcaacgcctcttgccattgtcatcattgccagagatgcaacaaatccctgcatttttgtgtaggccacaaaaaaaccggtaacagcacctaaaacggcgcctagaagcatagatatgataatagcaacaaaaatattgatatgataatccataataaggattgcagaaacgcaggcacccaatgccatgacagaaccaacggacaaatcaattccaccagttaaaactacaaatagaattccaattgcaacgcagatcggcgctgcttgctgtaatgcaatgtttcgaatattcataacagttaagaagttatctgacaatgcacagcaaataaaaaataagattaaaagaataatatatgtgttattttggatcagttgtttttttaaatttacattcctttttacacgattcattatgatacccccatagcaaatttgatcaaatgctgttcatttaactctgtgtttggtaattcaccggtaattttaccttgccgcataataattgctctgtcacataatccaataatttctgtcatttctgaagatataataatgatagcaacacccttttcagcaagagaattgatgatatgataaatctctgttttggcacctacgtcaacacctcttgtgggttcatctagaatcagacatttgcagtcagcggcaatccattttgccaatgcgatcttttgttggtttcctccgcttagactatttgcacagtcttcgctactgccgtatcttgtggacaattgtgctaataaatcgcggacatattctttttcctgcttatgatggatgattcccaatttatttgtgatttttttcttgacggttaaggtagtattcattcggatgctctgttccaacaataagccctgttgtttgcgatcttctggtaaaaatccgaatcctttggaaatggcatctttcggacatttaaaatcagctttttgcccgagatataaaatctctccggtatctttgggagtggcgccccaaacagccttcattgtttcagttcttccggcgcccaccaatccgctgaatccaaggacttctccggaatgaacttgaaaagagacattttttacaatacttccaacggatagatttttcacatctaatacgacctctccaattttggcgtttcttttaggaaataactgtaccatatctctgcctaccattttgcccaccaattcttgctttgtaatattttgggtttctaccatgtcaacaaatttaccgtcttttagaacggttatatgttgactgattctaaagatttcttctaatcgatgggaaatgtaaataatacttgttccttgttttttcagtttttgaatgatatcaaacagtttttctacttctgcaaaagtgagaacagcagtaggttcatccagaaccaatatgtttgcatttcttgttaaacatttgcagatttcaacgacttgctggtgtgcgatgctaagatctcctacacgggaagcagggttgatttcataaaaccctaacttttccaattctttttttgcgttggaatttagttctttccaattgataagtttttttccacagcataatttatcgataaaaatattttcggcaacagtcagatccggagcaagcataaattcctgataaataacagcaattccctgttcttttgcgtcttttggagaattgatttttactgattttccattgatatgtatttcaccggtatctttttggtatgcaccggatagaattttcattaaagtagattttccggcaccgttttctccgatcagtgcatggacttcccctttttctactttgagctgtacatttgaaagtgcttttacaccgccgaaagatttggaaatatttatcatttctaattgataatcattttgcacggttgttcccccttttgaataaaggagcacctcttcaatcagaaatgctccttagtgacagaatcgattttagaagccaaaatcgtaacgttcatctacattatcgatagtaacagcaacggcttccgtcagaattacatcgtcataactcttccagtctttgccttctaccaagatttcttttgctacttccattcctttttcggcaaccttaaatggagagttttctcctgttgcgaaatattccccttttttgattaagtcgtacgcttcttttgctccgtcagcagcagctacaagatccacaccctgaattcctgcgttttcgagtgcatcttttgcaccaaacaacatctggtcattttctcctaaaacgcatgttaagtccttattggcggtgatcagatcttctgcagcaattaacccttcttctcgtgttccggcaccccagccttgacctcttaaagtgaaattggcttcttcgtttcttgcatttccttttgctacaagttgatcttccattttctgtgctgcttcccatgcttcctcttctgtgcatccggttctagattcaataattccacaatacaggcctaaacgtctttccagacatgcgatatttcctttcaatgcacttaaaagaacagcgatgatttcttcgtctggatttacatattctccataagcgataccaactaaacgtccattttgtttgttatcagaatagatggttgtacattgatcacattcactgactccactgtccaaattgattacaggaatatctgcttcagctgcagcgttaatacttggaacacaggcatctgggtctacactatccaaaaagataagatctacgcccttggtgatcagagtttccatgttttccgcttcttttgtagaatctccgccagcatctaatacggtacaatcccagccttcttcggcagtcatttccttgatactttctacaagacttacaaagtatggagaatcctgtgttttcatacagaatccgacactgaatttatccgcttcttcttttttgtcatctgatgctttctttccacaaccggcgagcattgttcctgttaatgcgatgcagagaataaaactaagcgctgattttaagatattctttttcataaattgacctcctttaaatggtgtttacgcgtaatttcctaattctttcgcaattttggcaaattcaataatattttcaataggcatatcatcctggaagttgcttgttggagccataatatatcctccatcttttcccagagattctattcgcattctcatctcctttcttacccggtcttgatcgaaaattaaagctgtttgctcatcgattccgccatgaaaaattaatttatcgccatattccctttgtaaccgatatgtatccatttcatcggcacttggctgaattggattcagaatgtctacaccgctttcaatcaatccatccaataagcgataaacagatccgcaagtgtgatggaaaatttttgcctgaggtgctttgctacgtataaaatcattcagtttttttctgcggggaaggatcatttcatcaaatagttccggtgacatcaaaggtccgttttgtgtgccataatcatcagaagtttcgacaatctgcaggtattctccacattcggttaagagaacatcatacaaccccatttgtatttccagtgttttatccaataacttgttggcaaattctttatctacgatcatatctacaaggaaattttccatgccacgcaattcccatgcgagttcaaaaaaaccatgtgagacagatcgggatgcaagcgcgtaatcggtgttttcatataaatattttgcgcgttcctttaagcccacagttctcccttttgcgtaaggatcaggccagttatacagatcgatatcttcaatttccgcatcagccagaggagtgccggataattgtgtcatcccatttaacaacttcttttcgattccaaattcgttgataatgcctccgttttctttgaatgggttataaccttctgggggcaataaaaacagatgccgaaaatcacttcctaatttttcaagtacttcgtcattgtaaaaggcagagctttcatctggacgggcaacgatatcttcgcttgtgattccgaaatattcttttactttaagaaatatcggattggttagtcctgctgcggtcgaaccaatatcaacagcaacccggtcaggttttttgtgttccaatatgcattgaactctttctcttggtgtcataatagcaagatcctcctataaatctaattcagccagttctttaaattgctcttttactgcagggtatagttgagaataaatctggtaaattttttgatagagtacgatgtttttcgtattgcattccacgcgttcttttttctgttttgctttaaactcatggaacgaagaaatcaatcctacaccataagcagccgtcatcatattaccgacagcggttgcctcttcttcaaacgccagatataatggtacattcaaaacttcagcaaaaatctgcatccataatttacttttggaaattccaccggcaattgtaatctctttggatgtaaccccttctgcagcctgtagatctaatatttctttcacagcgaatgcatttccctccatgagagcacggataaaatgccctttggtatggttgggagtaataccaaaatacatccccttcatatttgtatcccactgaggacatcgttgtccgactaaagttggcaaaaacagtagtttatctgcaccaacagcagttttttctgctaggaaattcatatgatcatatacattgttgtcggttttttcctgcataaattgatcccgaaaccatctaaaatttccacctccgtagtcaactccggctacattgcaccaggttccgggaacaatgtgattatatacatgtacaacatcactgctgattggctgatcagaacaaacacccatggcagttacggttccgccagtgataaaggaatcaccgggagcgacaacgccacacccaagagcacagcttacaacatccattgctccggccgtaacttttgtgttttcagacaatcctaataaagaggctgtttctctgctgatatttccaacaatttcatgacatggatataaatccggtaatttgcgtttgtctaatttacaggcttgtatcaattcatctgaccagcaggagtttttaatatcgaatatttgtgttaatccgccttcggaaatatttgatgaaaaacgtccggttaatttgtaaacgatatatcctgttgcattgagaacacaatctgtttttttatacaattcatgttcataatctcgcagccacatcagttttaatgcaacgttggactcgtcattatgatttccattgatggaattgatgacggattgaccaatattatgatcgatccattgcttttctgctttggcgcgtcgatcggtccagatcatagccggatatagaatttctccggaagatgtcatgggaatcatggagctgctctggctgtctacaccgattgcaacaatatcatgcttgtttatgttcgatttttcgagaatagattttgctgcccagacaatattttgccaccaatgttcgggattttgttctacgccgccattatcccgaaaaaatgtactgtgttctttataagctgtttgaattacggttccgtcttggtcaaataaaagaactttacaactagatgttccaacatctatgcttaaaatatagtttttttgcattgctctctccttttatttgttgtttgaaaatgtttgaatttaaacatattatacatcattcgaacatattgtcaagtaatatgcacaaaatataaagattttatttaaaaattatgtagaagtttacacattttcgaacttttcaaacaaatttcgaacgtttctattgtttattttggaaaaactaattataatgacatatgaatagacgaaatggtttattgtggttgaatgagtggttcattatagaaggagggagtgataagtatgaaagaggaccgattaaaaatgattgttcaatatatgacagaacataataatacggcaagtgttatggagttatgcgatacatttcatgtttcggacatgacaattcgaagagatctgcagacgcttgaaaagtcaaaacagattatcagacatcacggcggcgccagtctgaataatatagcgaattcccctttttcagcagaatccttaaatatgcgtttaaatacgaatcgagaattgaaactgtcgttaggaaagatcggcgcaaaatatttggaaaaagaattggaaagagtggaatgtagctcaatatttttggcatccggctctacgttatattgtatggcgaatcagattgatttttccttgaatcagacaacgcttgtgacagataatttgagtgtttctgagatatttgcacccaatccggaatatacggtgattatgatcggcggtcagattacattgccgtctttaaattgtgtcgggcatcttgcagaaaaaatgattagaagttttacttatgattatgcatttataggagcggcgacaatagatgaagaaggatatgtttatacttataattttattgaggccggaacttttctgtcgattttagagtcatccaaaaaaattgtagtaattgcggattctaccaaagtttgtaaaaagacatttgttcagctttttaaactccagaaaggtcatacattgattacaaattctgatattccggaaaaattcagagaaactttgatgtcaaacggggttcatattattacggattgaaaaatagaggggctgtcgcactaaataattagtgcgcagcctcttttctatgcaaaaaattacagccaggcttcgaaaagcctggctgttggtgtaaaatataagtatgcaaacccctatattattacacaagaattatactttgaatgaggaaggatatcaactaaaacttcctttaaacttagaaacaattattccagtagatgattctgtgcggttgctgagtcagtttgtggaggctatggatttaacggacttatattctacttatgaaagaataaatacagtatcgccaagaacactcttgaagattgttttatattcctatatgaatggtgattattcctctcgctctatggaattgaactgtaagcgagatattaatttcatgtatcttttagagggaaaaccagttcctgaccatgccacttttgcccgtttccgaagtattcattttgctccgtgtgcgaaacgaattctcgctgaaatgtctaatctcctttacggacttggagaaatttcgggagaaacgatttttatagacggtacaaaaatcgaagcctgcgccaataaatatacatttgtatggaaaaagacggtaaccaaaaatcaggcgaagttgctgattaaaatcgccgatctcattgcagaatgtgagcaactttatggtattcggattgttcacggtgatactgttaaaatgaaacacgtaaaacggttacgcaaaaagctgtacgcattaaaacaagaagaaaacattgtatttgtacatggtattgggaaacgaaaaactcagctgcaaaagagtatcgaaacattagaagactatctggaccgtttaaaaggatatacaaaaaaactgcatatttgtggaaaaaggaacagttattctaaaaccgatccggatgccacctttatgcggatgaaagaagatgcaatgggaaatgggcagttaaagccagcatttaatttacagcatggagttgattctgaatacattgtatggctgacaatcggaccacagcccacagatactaccaccttaattcccttcttaaaggaaacagaagaatatctgacatttaagtatcaaaaaatcattgcagatgctggatatgaaagtgaagagaattatgtatttctagatcaaaatcagcagttggcatttatcaaaccatcgaattatgaaatatcaaaaaagagaaaatataaaaacgacatcggccgtatagaaaatatgaagtatgatgaaaaaagtgactcttatatttgtaaaaatgggaaacagctgccctttacacatctccgtcgctctaaatctaaaaccggatatatcagtgaaaaaaacatttatcaatgtaaagaatgtaaagattgtccttacaagaaagagtgcatcaagggaaataactgtaaaacaccaatagaagagcgaaacaaagtgctttccgtagcaaaaacatttttgaaatatcgggaggaagatttggagcggattctttctgacgaaggaattcttcttagaataaatagaagcatccaagcagaaggatcttttggtgaactgaaacaggatatgcagtttcgcagatatttgagtcgtggcacagagaatgttcttgctgaaagtgttttgctggcaatggcaaaaaatgtaaataaacttcacaacaaaatccaaaaagggaaaactggaaggcatttatttcctttgaagagtgcataaatttagagaatccgaaatttttttcaaatccagttttggattgtattaaagtacggcttttttacgaaaaagctatcgtttcaatagaaacagagcaactatatagcgaaaatcagaaaaaaggaagctgccgcttcacgatttgctaatcgttaaagcgacagcccctctatttttaattctgataacaatatccgccgttttctttcactccgtaaaaatcggcgaaagacagatgaaaaacatctttttccataccggaaaggtcgatctgatgtttgatcagatattgataaattccagaataatcaatacttccctgtaataaaatactgtctaattttccatctcgtaaaatggcacgtttataattgtgagaatcttcctgttcgagaacaacatctccctcttcttctgttcctcttccaagagaaagtgtaaccagcccatagaagttcatcgtatttttcatagcatatcggtcttcgtagaccgttttgataccgcacatattcagggcggcaacctgtccctgtttcatagcatttggccagataccggatagtccggtcacatctccggcggcaaaaatgtctttgcagctggtttccatggtgtcagatactttgagaaaacgatccacttcgatcggtgtattcagtacgcattcaacagcaggacgaacaccggcagcaacaatgaccaggtcacacgttacctttgtaccgtcatccagaagtacatagtcaatggaaccattcgaatccatgtgggtttcagaagctttttttccaagaaggaagcggcagccgtgcgcttcgaataattttcggtaggcgtttccggctgtttcgttaagctgaatcgggagaatacggtcagccatctccactacagtcacttcttttccctgctccaaaaaggcgtatgcggcatccattccgaccagaccggatccaacgatcagaatgcggtttgcccggtctgccaggggacggatcgcctgggcatccgagagatggcgcagtccgaatacattctttgcttcccggaactgtcccacaggaggaataaagctattggcgccggttgtgatcagaagcttgtcatagtggcaggaagtcccgttatcaagaagaacagcttgattttctacatccactgttttgacagaaacacccttgatccagttgatcttattagtctcaaaaaagtcaggctctacaaaggataatgtatcttcctggcgttcatggcttaaataacgatgaagcatacagcgggaatgcacatgttcgtctgtagaaatcatagtaatggaggcatccggcatctggctgcgaatggtcttggcagcggtgattccggcagcgccaactccgataatgacatgcatcataatgacacctcctcaacatagattgcctgtgttggacatgcttttacgcagtttggttctgcaccgtctttcaggcagaagtcgcattttattacggttctatgtgtggctgtgtctggtttgagaacgccgaatgggcagttcataacacacataaaacaagagccacattttgtttcgtcataggtcacaattcctgtttccggatcttttgtcagagcaccgctcatgcaggacatgacgcattctggctgatcgcagtgtctgcagaaaatcgggcgataggttccatctgacattttttcgatatgatttctggattcgttgcggatatccgtcagatccagatcataaatgtttcccggagtttcccggtgtgcctgcatgcaggcgatggtacagtttttgcagccatcgcattttgaggcatcgatcataattcgtctcatagcggcacctcctatatgtgtaagccctggcgtttttccagaatgatctgctccagaatatctgcagattctttggcgtcaccattgatgataacttgtcctccggtcagttctttcatgtcttctgtcagcactttgacagcagttttgcttccggttacaaacggaggaagtccaagatgcagcgggagacccagagcaagcccgaaacatccatcggcaagtgcctgttcttccagccattgtgcagcagaaagtaccagtggaagctgtggaagatcgactcccagttcagcggcgatctctgttgcaacgatttccagacggccgatggcaagacaaggaccaaaattcaaaacaggcgggatgccaagcttttcacagacagcacgcagttttggcccggcatacttggctgcttccggggtcatgagaccgcagttttcgatgccgcctgaagaacatccggcagtgagaacaagaatatcacgggagatcagttcttttgtcaattctacgcttaaaacatcatgtcctccggctgtcagattggagcagccaacaacacctgcaagacctttgatctctccggatgcaagaagttcgatcagcggcgcccattttccgccaaggaaagcttttaaggagccctcgctgacaccggtcagtgtatggtcatttccgtgttcttccatgagttgtaatggaacgacacctcgtctttctttataagcatcgatgatcttatcaatgatgagagcactctgctcttctcggttttcaaattcaaacggcatgagctctgcatttgctttttttgcaacatcatccagacagatctgtttgatcttcagtttgtcacaaattggctcaataccggggagggtacagttaaattctgaaagaactgcatcgatggctccggttgccaggatggcttcacttgtatagttatttccggcatggccgtcaaagacttctgtgtagtgtgcacctctcagctgtaagtcctgtcccacacaggtacatcctaccagtttgaatccttttgcacctgcagcctgcgcctttttctttgcctcttctgagatcagacgctcctgaagatctacgaaaatggtgtgctggtgtccggtgatcatgatgttgatgtattctggatcaatgacgcgaagtccgaccggagcgaggcgaagttccggctgaccaagtaaaacgtcattgagcaggttggtcagagtcagtccgtataccccggtagaaattccaagcttcagacagtctgtgagcatatccacaggatcggaattcagattggtggaacattttacaacacctttgaatacttctgctttcgcgccgccaggcatgatcccaagttctttccaacgtttgatacggggtgcatatgcaatcttttcaatcaattctgcagaaacatactctggtttgtacagatctgcaaggactgcatctgccactttttctgctttgatatagatatccccgtctgtaatgccaaacaattctgccagatgatccaatgattccagaccttttaattctcctttgatctgagccgtcttttttaagttcagggctgtattctcaacaatatggatatagcatccgcttccggaagccacggctcttaggaaattacgggttacaatcgtatcggcatctgcgccgcagattcctcttggtgcatttggagtgatgcggcagggtccgttagaacaaagacggcaacagactccctgcagtccaaatccacattttgtactctggctttctacgcgatgatgggacgtttccatcggaagagaccggataaatccttccaaaggtttatctgcacttttacatgtattacatccataacattgattcattgttttaaaatcctccttaaaagtataccaaaatagtaaagattcgggcaaaatagtgttacccgaacaattcggcaagagatttttgcttcatttcctgcacgagtatgctctgcagtctgcagaattcatgatgtaccagacatggatttttcgggctgttcatggaacagtggtagttgtccttcatgcattctaaaagaacaatctcaggatctacagcagcacaaatatcataaagggatatttcggcaagagtcttgttcagagcatatcctccgttcgtaccgcggcagcttttcaaaaatccggatttttccagttttctggtaattttataagtcatggcagagggcagatgctctatgtcgcagatcctggagacactgatgagttccccggaagataaagcccgcatgatacggatcgcatagtcacattctttggtaaataacatagttgacctcctacacattttgtctaatcttataatattggactaaaatagtcaagtattagaggagtggaaaaataaaatagggattgtgcataaaaaacaaagatcttttaggcgataagaacaaaaaggaagagaaaaaactgtacaatagcaccaaagtgtataaaggagattgacagacagagaaagttgtgactataataaaaccaagatatgaaacgggtttcaaaaatgtttcacaacagtaaaagaaagaggacatacagatggcaagtatcagagaagttgcgcggattgcgggggtttctcctgcaacggtgtcgcgggttatgaatggaacagcgaatgtagatgagcagaagaggcagcgagttcttgacgctattcaagaaacgggtttcaaaccgaatgaactggcaagggcgctgtttaaaaagtcttccaggatgatcggtatgatcgttcccaatattgaaaatccgtttttcagcgaaatcgccaaggctgtcgaggaagaagcctttcaaaacggatataagatgttattgtgtaattctgcaaataatccgaagaaagaacgaatgaatattcagatgctggtacagatgcaggcagatggaattgtgatcatgacgaacagcgatcgtacgggaaagaagattgcagagtgtggacttccggttgtggtgatggatcgaaagctctcggaggggcgggagacggcatttatcgaatcggatcattacaaaggagggaaacttgcagcagagcatctgatcgaatgtggctgtcagcatatcgtatgtctccggggtccgatgaaattttccagcggacaacagcgttatcaggcatatgaggatgtgtgtaaaaaatatggaagaaaggcggtctgggttgactgcgattatgattatgacgccggacttgcggcagcagaagagctgatccgcagatacccggataccgatggaatcctggcaagcaatgacatggcagcaatggcagtttacaaggttcttcaccagaacgggcggagagttccggaagatgtacaattgattggatttgataatattgaattcagcaggagaatgacaccggagctgacgacaatctcccagccgatcgaagagatgggaaaactggcagtacagatgattattcatcatggagaagagattgcgtatcagaaagaaaatatatttgatgtggagctgatcaggcgacaaacgacgaaaaagagaggagaagcagtatgaaactggcagtagtaggaagtattaacatggatatgacggtgacagccgaacggatcccgttaaagggagagacgcttcgcggggacagccttcactacattccgggaggaaaaggtgcgaaccaggcagttgccatggcaaaactgggggcagaagtggagatgtttggctgtgtgggaaatgatgccaatggagctcagttgttggacaatttcaaaaagactggtgtggcgaccggacatatcaaaaaattacaggatgttccgaccgggattgcgatgattacagtcggagaaaatgacaatacgatcattgtggttccgggagcaaatggaaaggtcgatcgtctatatattgatgagattaaagaagacctcaagtcatttgatatggttgtccttcagcaggaaattcctctggatacagtttattatgtggttgatttttgttatgaaaaccagattccggttatcttaaatccggctccggcttccaatgttccgctggaagtaatcgaaaaagtgacgtatgtgacgccgaatgagcacgaagcggttctgatctttggagaggagcattctacagaagatttgttaaggcagtatccggaaaaactgatcatcacacagggggcaaaaggtgtgatcacgtgcagaaggaacggggagatcctgagagtgccggccagaaaagcagatgtggcagataccacaggagcaggggatacattaaatggtgcatttgccctgcagagagccaagggagcggatatggaacgtgcgcttcggtatgccaatgtagcggcaagtttatctacagaaaagttcggggcacaaagcgggatgccgacagcccgggaagtggaagatgaattggaaaaactgggaggaaaagcatgaaacgacagggaatcttaaacagtgatatttccagagtactgtcttatatgggacatacggatacgatctgtatcggagactgtggacttccaataccagatgagacagagcggatcgatctggcagtgagatttggacagccttcatttatggaagtattaaaagaagttggagcggatatgaagattgagaagattgtactggcagaggagatcaaaactcataatccggagatattacaggaaattgaacaattttttgctgaaaatgaaacgggtttcaaaccggaagtagagtttgttttacacagtgatctgaaacgaatgacaaatacatgtaaggcggtcattcgaaccggagagacaacgccttatgccaacattattttacagtcaggttgtattttctagggaggagaacggctcatggaaattgaaatgagagggatcaacaagtcttttggagacaatgccgtgttgaaaaacgccggatttgtgctcagtacgggagaaattcatgcattgatgggggaaaacggggcaggaaaatcgacgttgatgaagattctgacaggtgtttacacaaaagatgcggggcaggtgatcgtggacggaaaagaggtctgctacaaaaatgccagagaggcagaaaaagcaggaattgtatttatccatcaggaattgaacgtattgttcgatcttaccgtagaagaaaatatgtttctcgggaaagaactcaaaaagaaatgcggcgtatgcgataaaaaagcaatgcgtcgggaagtggaaaagattttgggacggcttggagtagagatcgatccggggcagcggatggaagaactttcggtaggtcagcagcagatggttgaaattgcaaaagcactgatggtagatgcgaaagtgatcattatggacgagccgacggcggcgctgacccagagtgagacaaaggttctgtttgaagtggcaaatgcattacgtaaaaaaggtgtatcaatcgtttatatttcccaccgaatggaagaaattttcgaattgtgtgaccggatcacgattctgcgcgatggaacttacattgatacaaagaaaatttccgaaacagatatgaatgatgtggtcaggatgatgatcggaagagagattggagaacgctatccggaaagaagcgtggctgttggaaagaaggttcttgaagtgaaaaatctgacctgtccgggtgtgtttgagaaagtttcgttcgaagtacatgccggagaagtgcttggtgtatccgggctgatgggggccggaagaacggagatcatgcaggcaattttcgggaatatgccgcatgtgacgggagagatgtttctggatggaaagcggattgaaaataaaacgccgaagcaggcgatgaaacatggaatcggatttattaccgaggatcgaaaagtagaaggactgatgctggaagagagcattatgaaaaatatctctcttgcaaatttaaaacggatctcgaagcatggagtgattcagagagagaaagagaaggaactggtcaaacagggaatcgaagaattacatatccgttgttttggcccgcagcatgaatgcaataatttaagcggtggaaatcagcagaaagttgtatttgcaaaatggatgtatacaaacccgaaagtactgattctggatgaaccgaccagaggggttgatatcggtgcaaaaaaggaaatctacagtatgatcaatgatcttgctgcaaagggagtggcgatcattatggtatcttcggaactgccggaagtactcggaatgtctgatcgggtgatggtagtcagagaaggtctggtaagaggatttttaagtaaagaagaggcaaatcaggaaaatattatgattctggcgacaggaggaaatctcaatgaataagaaaaaagcggcaaattatatacaagatctgggggcgctgatcgcgcttgtattgctgatcattgtgatcggagcaatcagtccggaatttcggacaatagggaactttttgtcattgcttcggcagtcatcgatcaacggactgatcgcatttggtatgacgtgtgtcatcctgacaggcggaatcgacctttctgtcggatcggtgcttgctttgaccacagcattgtgtgcaggatttatctcaggtggaatgccggtcggactggcaatgatcctggctttggtgatcggaaccggatttggctgcatcagtggactgcttgtaacaaaaggcagactgcagccgtttatcgcaacattgatcaccatgacagtgttccgtggactgacgatgatctatatggatggaaaaccaatttccaatctgggagacagttttacattaaaagtcgtgggaaaaggaaacttttatcatattccgataccggtgatcttgtttttactgattttcgtgatttttttatttgtactgcaaaagaccacattcggacgtcatatttatgccacgggaagcaatgcaaaagctgccaatctggcaggagtcaatattgaccgtacaaaacttgcagcatatgcaatttccggatgtatggcagcattgtctggactgatcctgttatcccgtcttggttctgcacagccgacactgggagaaggatatgaactggatgcgatcgcagccgtggcgcttggcggtacgagcatgaatggtggtcgcggaaaaatctggggaacgtttattggtgttttgattattgcggtactgaataacggactgaatattctgggagtatcttcttactatcaggatgtcgtaaaaggaatcgtaattttgatcgcagtattgtctgacaggagacgataagagaaggagaatatggtatgagaatgaagagattgataagtgtactgacagcggcagtgatggtgttgggtgtgacagggtgcaatgccattaccattgacggggaaacagagtatgtatccggagaagcagcaggaaatggaagtattggtttttccgtttctacattaaacaatccgttctttgtaacgttgagtgaaggcgcaaaagaaaaggcagaggcagaaggggaaaaactgatcgtggtagatgcaggagatgatgcggcaaaacagaccagtgatattgaagacctgatctcaaaaaatatcagtgttttgatcgtaaatccagtggattccgatgcagtcgcaccagcagtgaaagatgcggtttcaagggggattaaagtgatctccgtggatcggggcgtcaatggagttgatgtggattgtgcaattgcttctgacaatgtagaaggtgcaagaatggcaacagagtatatggtatctcttctcggggaggatgcaaaggtcgcagaactggaaggagtttccggagccagtgcaacgatcgagcgtggaaaaggtttccatctggtagcagatgaaaaactggatgttgtttccaaacagaccgcaaacttcaaccgttccgagggaatgagcgttatggaaaatatgctgcaggcaaattctggaatccagggtgtgttcgcgcataatgatgagatggcgcttggagctgtggaagcagttggaaataagaaaatcctggtggttggttttgatgcgacagacgatgcggtcgcagcagtcaaagcagggaaaatggcggcgactgtggcgcagaagccagatctgatgggagagacggcggtagagactgcaatccggattttgcaggatgaagagattgaaaagaccattccggtggaagtggagctgatcacaaaggatactgcacaataaaagaaaatcgtaaaaatcgtcttttgcttgaataaagcagaaggcgattttttattcatctgacaatgcttcttttccatattgaattgtaaatatctggttccttggaatgtcaattttccttcattgccttctgtaagcgttccgtactctgagccggatacagacatctctattctgtcaccactttccacttgaaagtgacataataagtagtattggatgttgtatgatatccatgagctcctgatgcatcttcagcgtttggatgattttgtattgtatcatattgcaataaaaagtgaaaaaacggatatgaatttagcaaaaatgacggagaaacagttacggttgtccagtccatgaaaagcgtgttaaaataagctggttaattagaaatgtttcagaaaataaaggagcgcttgtatgaggcgagatgtagatttaaatgagatttcagatggaaaattatatacgtcgaatgatatggtaaaggcagactgttatgattgccaggggtgttcggcatgctgtcgcggaatggggaaatccatcattctggatcccattgatctgtttcatttgaaacagggaaccggtaaggattttgcgcagcttctggatcgggagatcgaattaaacgttgtggatggcatgatccttcctaatttaaaaatggatgaggacacagatgcctgcccatttttggatgagaaagggagatgcaagatccatgcatttcgaacgggaatctgccgtttgtttccgttgggaagattatatgaggaagatggattccgatactttcttttaacacaggaatgcagaaaagaaaatcgtggaaaagtgaaagtgaaaaaatggctgggcatcacaaatctgaaagcttacgagaagtatatttcagactggcatacgtttcttcagacttgtgaggaggcgatgagagagctggaacaggagaacattcgtattcttacgatgtatgttctgcggttattttatcagactccatatcaggcagaagatgatgaggcattttatcaggaattttatgcgagaagagaacaggtgcgaaagacacttggaatttaaagggctgcagcagaaagagaggatgtccggcagtggaatatgagaagctacagattttaaaaacatattttggctatgattcatttcgtccggggcaggaagaaatgatagatcagattttggcgggaagagatgcgctaggaattatgccgaccggggcagggaaatcactctgttatcaggttccggcattgatgcttccagggatcacaatcgtaatctcgccactgatctctctgatgatggatcaggtaaaagcattgaatgaggcagggattcatgcagcatatatcaacagttcactgacagaaaatcaggtggcaaaggcattggagtttgcaaaggcggggcggtataagatcgtgtatgcagcgccggagcgtctggagacgccaaggtttcttgattttgcctgtcatgcggaaatctccatgatcactgtggatgaggcacattgcatttcccagtggggacaggatttcagaccaagttatgtgcggattgtttcgtttatccggcagctgccgatgcgtccgatcgtaacagcatttactgccacggcaacaaaacgtgtccagacagatatacaagcggtcctgcggttacaggatccttatgtggcagtgaccgggtttgatcgggaaaatctgtactttgaggtacagagaacgaaagagaaaaaagagaggatccgggaatatttggaaaaacatccgggggaaagtggaattatttactgtgctacaagaaagaatgtagatgagttgtatttatttttggaaagtgcaggtttttcaacgggaagatatcatgcgggaatggaaaatgaagcccgcaggaatagtcaggaggactttatctatgatcggatccaggtgatgatcgcgaccaatgcatttggaatggggattgataaatccaatgtccggtatgttctgcattataatatgccacagagtctggaaaattattatcaggaagcggggagagcaggacgcgattcggaaccggcagagtgtatcatttattattcccctcaggacgtggtcatcaatcagtttctgttggaaaacaaggaaaactatggggaatatacaatagaagagatgcagaatattcaggcacaggacagagaacggctgcaaaagatgataacctactgcacaacaacaggatgtttgcgtaattatattttaggttactttggagaatcgggaaaagagccttgtggaaattgttccaactgcctggaggaactggaagagatagatgcagcagaatcggctgcaaatattatagagtgtgttcgtgaatccggacagcggtttggaatcaatatgatcgcaggtacacttctgggagaaaatacggcaaagatccgaaattatcggatgaatgagaatccttgttacggaaagcagagcaaactgggacaggagcgggtcaaggaaatcatccagacaatgctggaacggggatatctgtttcagacaaaggataagtatgctctattgaagctgactgatatatctgaagaattgctgcatagaacagaaccgttttgggtcgcatatagaaagccagaaggacagaaaccagtgaaaaagagaagagcaaaagcaatcggagatctcaatgaaaaagcgcagcatctatttgaagagctccgaaagctgcgcagtgaactggcgaaagatcgatccattccgccgtatatggtggcgtcggataagacgcttcacgatatgtgtgtgaaaattccactcacgaacgaagaaatgttgacagtcaatgggatgggagcaaagaaattggaacagtatggagaggcatttttatactgtatccgcgatattacgaatggagataaggctgcatacggagcaacagagatgaactatgatgcttcagagattccgctgacggagcgggcgaaaaaaggaagaaaagaggcatttcatctgacagaggcaatggaacagcagatcgtttttgttacagagacgacaatcagcgaatttgtcgcatctatcaatgccctgcgagatgaaaagaccatgaagcgtctgaccatcaaatctattacagaagaacttctggcagaggggtatctggaacagaagttctggaacggatacagcaggacctttctgacagaaaaaggagaagcgctcggcatccggacagaggagagagaaagtcaaagcggaaatctgtacgatgtttttttatatggggaaaaggcacagcggtatctcgtagaactgctcagatctacagcgggctgatgcccgcaaacccattccagatgcaggacagtgtaaataaaagtccgaaaatggaagtaaaatataaaaacagcaattgtcctgtattgtgcatcttgctgctgcagatgcggggaatggaacgatactttcgaagcaaaagaacaatcccgcagaataccagtacatttgtgaggacatcatacagcagatctccggtgtttcctggcaggagttctgcaatccgcggcaatacatctcccaggatcagattgttggaaatgtgcagaaggagactgtgccagatcgaatattccatggcaatgtatccaagaatgaggccggcagccagagcaaacggaatctgcgcaaagtttccatgcatcagtgcaaaggcaagtgaggatgcaagcagagcaaaccatttgccgaaaggttccagagtttttaaaacagcgccgcggaagatcaattcttctaccagcggagcaacaaatccagaatataaaaacatagaaagcgtagcagagcctcctgtagcggcttccagggagcgtacgaatgtaaagccaaagtgttgtgcgcctgtttccatgagtacataaagaatggaagaagcattctgtgcgatcatgaaaattccgaaaaagccaagaaatttcccgggactcatggtagtacgaaccgggaagatctgtgttcggaaaaaggaaggtctgcgccatatcacaaaaagtccaaggcagagaaaactcgagatcagataccagaccgctccgtcgttaaaattttcatcagccggaaacagtcgatacatggtcatcataatgaaaatcgtgagctggctgaacaaaatcttataaagaaaaatcatgccgtttgtcttattgaattcacgtcgaatccattgtttttgaaatctatccatacataccatcctgttaaataaaattacttgttctttatcatatcatgaattttttcttcagacagtaagttcacaaaaagttcttttgattttttacaaaattctacttgaaaataattatcaattatgatagcatctctatgttagttgaaactatctcagaatagacaagagaaacttttaaaagaaatgggaaaggaagggaatatgaaaaagaatccatggaaaatagtatggctggcagcagcgtttttgtgtttgggaatcggggcgatcggagtggttttgccgattttgccgacaactccgtttttattggtggcatctttttgttttgcaaggggatcggagaaatttcataagtggtttctggggacgaaactttataaaaatcatctggacagcttcgtgagagaacgtgctatgacgttaaagacaaagctgtgtattttacttccggtatccgcaatgctgatgtgtgcattttttatgatgagtaatctgccggggcgtatggttattcttggattgatcctttttaaatatacatatttctttacaaagatcaagacgatcagaatcgaggcggcttaagtgaaaggtgcaaaagaaaaaagaaaatgggaaaggaaagaaacgtatgattaagacaagactactcaagctgttgaagggctcggaaaaatatatcggagctaatattttctggcagtggatcgcactgctgtttcagatcgcagcagtgtttgcggcaggaaatatgatccagcagctgtttgaaaaaacattggatcagcaggtgatgctgcaaacggcaggaattgtgatcctggcaatctgtgcgcgttttctgtgcgaaaaaggagctgcatatgcctcttatcgggcaagtgcggatgtaaagacggttttaagaaagcagatttatgagaagctgctgtgtttgggagcggcctataaagaaaatgtatctacttccgaggtggttcaggtgtctgcggaaggagtcgagcagctggagatttattatgggagatatcttccgcagctgttctacagtctgcttgcaccgatcacgttgtttgtggtactgtcaccgatcagcatcaaggcatgtattgtgcttcttgtttgtgtaccgttgattcccttgtcaattgtggcagtacagaaatttgcgaaaaaactgctgagcaaatattgggggatctatacagagctgggagatagttttctggaaaatctgcagggactgacaactctgaaaatttatcaggcagacgagcagaaagcaaaggaaatggatgaagaatctgagcggttccgcaagattacgatgaaggtacttacgatgcagttaaattccgtcagtgtgatggatatcgttgcatacggcggagcagcaattggaatgattgtgactgtcagagagtatctggcaggaaatgtatcactcgcaggggcgtttacgattattctgcttgcatctgaatttttcattccactgcgtttgctgggttctttcttccacattgccatgaacggaatgtcggcaagtgacaagatttttaagattctggatatggaagagccaaaacggggagagcacgagattgagggcgaacagatggacgtcacactgcagcatgtggaattttcctatgagccggagcgaaaggtattacgggatatttcgctgaccataccatccggaaaatttgtctctctggtgggtctgtccggttgtggaaaaagtaccattgcggcacttttgacagggaagaatcgtacattttcgggacagatccagatcaataatgtgccgattcaggagattaaagagtccagtctgatggataagatcaccttggtgagacataacagttatctgttcaagggaacggtagaagaaaacctgaaaatggcggatccatctgtgtcgagagagcagatggaagcagcgctcaggcaggtaaatctgtatgagtttttgcaggcacaaaatggattggatacgatgctggaggagcagggaagtaacttttcgggaggacagagacagcgtcttgccatcgccagagcacttcttcatgatacgccgatgtatatttttgatgaggcagcgtccaatattgatgtggaaagtgaggatcagatcatggaagtgatccgggagctggcaaagacgaaaacgattctgtttatctctcaccggcttgcaaatgtggtggcatctgatcagatttatatgttggaaaacggtcagattacagagagcggcacacatggagaacttatgaaaaaagcaggaagctatgcaaatatgtatcagaaacagcaggaattgtgtcaggtaagggagggaagagcatgaagcgaagaagtggaatacagattatgggaaaactgatcggactgatccgtcccctgatgcacgttatggcagcagcgattctgctaggtgtcacaggatatctttgtgcaatctttctcaccgtactggcaggagttggaatcctgcagattatgggaatatggcagggagtttctctgacgacattgtttgtctgccttgcagtgattgcggtactgcgcggaattctgcactatggagagcaggcatgcaaccattatattgcgtttaagttgctggcactgatccgtcacaaagtatttgcggttttgagaaagctctgtcctgcaaaactggacggaagagacaaaggaaatctgatctcgatcatcacaacagatattgagcttctggaagtattttatgcgcatacgatttcgccgatcgcaatcgcattcctgacatccctgatcatggaaattttctttttccgatatcatgtgctgatcggtctgttcgcccttgtgggatatcttgcaattggagttctgatgcccatgtggaattccagacgaggttcagaaaaaggaatggaatttcgtacccgtttcggggatctgaacagcttcgttctggacagtcttcgtggactggatgagacgatccagtatggatgcggagaaaaacgggaagagcagatggaacgcaaaagtgtggaactggatgcgaaacagaaagaaatgaagaaactggaaggaacgcaaagaggggggacgaatgttctgattcttttcttctcttttggaatgctgttccttacaacgtggctgcatcagcagggggagatcggatttgacgcagtactgctctgcacgatcctgatgatgagttcttttggtccagtcgttgcactgtccagtctgtccaacaatctgatgcaaactctggcaagcggcgagagagtattgtctcttttggaagaagaaccacagattgaggaggtatctggtcaggcgtgtgcagaatttgcggatgttacttgtgaaaacattgattttgcttatgaggaggaacagattttaacagagtattccattgaaatcccaaaaggaagccggatcgagattcatggaaagagtggttctggaaaatccaccttattaaaattgctgatgcgtttttatgatgcggacagcggttcaatccgtgtgggagacagagaattatctggtatcaatacaaaggaactgcgggatatggaaagttatgtaacacaggaaacctgtctgtttcatgattctattgcaaataatattgcgatcgccaggcagggagcttccagagaagagatcatcgaagctgcaaaaaaagcatctcttcatgaatttgtggaaaatcttccgaagggatatgatacattggtcggagaattgggagatactctttccggtggagaaaaacaacgaatcggtgtggcgagagcatttctgcatgatgcgccgctgctccttctggatgagccgaccagcaatctggattccctgaatgaaagtatgattttaagatctttggagaatatgggaagagataagactgttattttggtatcgcacagagaatcgacaatggctgtggcagaaaaaatttatcagatggaaaacggaaggatttcataagaagctgaaaatagtttcttttttcgttcgggttgtctataatagaaagagtgagagaaaatgaccgtagcgaaaggagaacattatgagtcagtatgatgtaatgatcattggtgcaggcccgggaggaatctttgcggcatatgagctggtgaaaaacgcgccacagttaaagattgcagttttagaagctggaaatccactggaaaaaagaaaatgtccgattgatggagtaaaggtaaaaagctgtatcaactgtaagacttgtgcgatcatgaatggatttggaggagcaggagcattttccgatggaaagtacaatattaccaatgattttggaggaactctgtatgagtatattggaaaagagactgcgatcgatctgatgcggtatgtggatgagatcaatgtagagtatggtggaaaaggaacaaaaatgtattctaccgcaggaagcaagtttaaaaagctgtgtctgcagaacaaattaaaacttttagaagcgtctgtccgtcatctgggaacggatatcaattatgtagtactggaaaatctgtatgcagaattaaaggataaagtagagttccgtttcaattattatgtggacaagttggagaaaacggaaaacggatatctggtgacacatggggaagatcaggatgaatgtaagaagtgtattgtttcggtaggacgaagcggaagcaaatggatggaagaagtctgccgggatatgaagatcccgaccaaatccaaccgtgtagatcttggtgttcgcgtagaacttccggcagcagtgttctctcatctgacagatgaactgtatgaaagcaagattgtatatcgtacagaaaaatttgaggataaagtccgtacattctgtatgaatccatatggaatcgtagtaaatgaaaatacaaacggaatcgtcacggtaaatggacacagctatgaggatacagaaaagcagacagagaatacaaacttcgcactgcttgtagcaaaacatttttcagagccgtttaaggacagtaacggatatggggagagtattgcaagactgtccaatatgctgggcggaggtgttattgttcagcggtttggagatttgatccgtggaagacgaagcacacatgacagaatcgaagatggatttgtcagaccgacactggcagcagaaccgggagatttgagtctggtacttccgaaacgaattctggacggaatcatcgagatggtatatgcactggataagattgcgccgggtactgccaatgatgatacgctgctctatggtgtcgaagtaaaattctacaatatggaagtggaactggatgagcatctggaaaccatgtacaaggggctgtatgtgattggggacggaagtggagtgactcattctctgtctcatgcatcagcaagtggtgtatatgtagcgagagaaattgcagaagcattataaaaatataagaaaacgatctttcagaaacgtatgataacgttctgaaggatcgttttttattgaaaaaattattcacagtaaagtgtaatatttgcattctcgatataagttctccattcttcggacagctcattgtcggtaatgataatgtcaaaatcctggattctggaaaatgcggtcggaaaaatctttccaaatttggaggaatctgcaaggagaatcttggtttgggcactttccatcagtgcacgtttgccatccatttcgtgaggtgctatgcaggtaacattcagtttttcactgattccggcagtagaaatgaaggctttgttaatgcaggtacgtttgatcatggaaatcccttccgggcaataaaacatttgtgtattgggatataaataccctccggagcaaatgatatcacaattgtgatgcttgctgacgtcaatcagtacattcatgctagaagcaacaacggtcatatgagtgtcataagacaaattctgggaaagataagctgttgttgagccactgtcaattgctaccacatcatttaattcaatgagagaagcagcttttttcccgatacgctcttttttatcttgaaaaaccgtacattcagaactgaggttgtattcaggatacaacggtgtattttcattcatacgataaattgccacaccattcactaaacggataaaaccttgctcttccagaagattcaaatctctgcgaatggtaatttcggatacatttaaagaagcagaaaattctttgatagaaattcctgtttgtgcaatcagcatttttttgattttatctaatcggttgagtttacttcgactcataaacatcctccttttcaaaatattttgaaaatattttaacacaaaaaatgaaaaaagtaaaaaataagtaaagattagaaaatattataaataaatttttagaaaaataaagaaaaaaaggaaaagaaaatgacaaaaaaagttataaaaggttttataaaaatgaattgtatcataaaagtgataaaaatatcaaaaaaagataaaaaagtatcagattttacataaaagtatgcggtattgacaaaaaaatgataatgtttaaaatgaaattatcaaatgctgaaaaaaagaaaaggagttagaaaatggaactgcatttagaaaatttggtgaaagatttttctggaacaaaagcagtcgatactgggagtttttccattatggacggaaaattgacagggcttttagggccaagcggctgtggaaagtctacattattgtacctgatttccggacttcaaaagccgagtcaggggaaaatcttttttggggacaaagatgtgacagaccttccgccggaaaaaagagggattggtctggtgttccaaaactatgcgctttatccgcatatgacagttgctcagaacataggctttccgcttttgaaccgcaaagagaagaaagatgtgatcaaaagaaaaacagaagaaatggcaaagctggttcaggtagaagaattgttgtcaagaaaaccaggacagctttcaggaggacagcagcagagagtggcaattgcgagggcattgatcaaagaaccggaaattttgctgctggatgagccgctttcgaatctggatgcaagacttcgtttggaaatgcgggaagaaatccgcaggatacagattgaaacaggggtcacgactatttttgtcacacatgatcaggaagaggcaatgagtattacagacgagattgtacttttgaaaaagggcgtgatccaacagcaatgtgctccgcaagaaatgtatttgaatccaaagaaccgttttgtggcatctttccttgggaatccgccaatagactttttccatatgccaatccgtgatggaaagctatgtctatcagaacaatatgggatttctgtaaaaacagatgtgcagggggaagcatatgttggtatcagaccagaagcctggggcgttggaaaagatttgtatgtaacagcggaaaccgtagaacaacgaggaaaagatgtccttgttggttttcatctggcaggagtgaagacgcgggcaattctgaatgttacagacaaggtaagtgcaggagatcaggttggtcttactctaaaaaacaatttgttatatctgtttgatgaggaaagtggtatgaggattccggcagaggtgagcttatgagaggaatgaacagattcaaacgagccgaaaaagagaatccacttgggaatacacattatagtttaaaagcgtatttgtatttgtttccggctattgtgattctttgtgtgtttgttttttatccgatcattatgactcttcgtatggggttttacgagagttatgtatatttgacagatacaggaaaaggatttggactgagttcttttcgatatgtgctgcatgatccggcatttcagctggcaattcgaaatacggtgatcattgtttttgttggagttccggttaccatagccctggctctgggaacggctctgtttatcaattctttggtaaaagggaagggattctttcagacaatctatttccttccatatgtaacgtctactgttgcaattggattggtatttcgctggttgtttcattcagactatggatatattaactactttttgagttttctggggattcccgcacagaaatggctgacgaatccaaatctgtctgtattttctgtcactatttttacgatatggagtggactggcattcaaaatcgtattatttttggcaggtttgcagaaaattgataaacaatattatcaggcggcacgagtggatgagactccgccaatgagagtgtttttccgaattaccatgcctttgctgtcctccacattttggatggtagcgatcgtgtctgtgattcatgcattcaaaacgtataatgaagtgtattcgatgtttggcggaaatggagcagggccgggaaatagcgcgatcacgatcgtatattacatttatgatatgttctttaatcgttcacaggtacattatgcatctgcggcggcgatcgtattttttgcgattattttggcgttgacggcgctccaaaaatggatttccagacgttttgttcattatgtgtaaaggagatgtctcatgcagaataaaatagcgaaaataataaaaattatcttacttatttttggggcgtttttgatggtgtttccgtttgtctggatgttggcaacatctttgaaaacattgccggaagctacggcgatcccaccgatcatgtttccgaaagaagcgcaattttcaaattacgcagaagcaatgcaagtcgctccattcggactctatttgagaaactctctgattgtatccggagttggaactctgctgacattggtattgaccgttttgtctgcgtatgcgtttacaatttttgagttctacgggaaaaagatcatgtttttcctgtgcctggctacgatgatgattccgtcagaattattgatcattcagaactttatcaccatttcaaggctgcaatgggtgaatacgtttcagggaatgatcgttccgacgatcgccagtggattttacatttatatgatgagagagtattttatgcagaccccatcggtattgtataaggcagccaagatggacgggtgcagtgactggcgttacctctggaaagtgatgatgccaatcaataaaaatgcaattgcaacaatcgggattttaacatttatcagtcagtggaattcttttatctggccgttgatggtatctaaggatgacaatcacagagtgatggcgattggactgcttcactttcaggatgcagtaagctctaagatcaatctgcagatggccggagcaacggttgtaattatgccaatggttattttttacctgattttccgaaagcagatcatcgaaggagtgtctcgcggaggaattaaaggatagatcccaaatcaagatgttatgaaaggagaaagaaaatggcgaaaaaaatagtgagtttgttacttgcaggagttatggcggtatccatgactgcatgtggttcaaagggagaggaagaaacaaaaaaacaggagaaaacagagattgttacagaaatcagtgagccgatcgagcttcaatactggcattctatctcaaatccaattcatctggaagtgttggaggctttagtggatgagtttaatgagacagtcggaaaagagaaaaacatcagcgttgtgccgacatttaacggaaacagcgcagatttatattccaatgtgattgcagcgatcaaagcaggaacagcgccagatgttactttggcacttcgtccatatgtggcagattatctgcagacagaatacgtggtagaccttgcaccatatattgcagatgagaacgttggaatgagtgattttgatgatatctttgaagggcttagcgatggtggctccaactatgcaaaagaaggaatgtattcgcttccaattcattcctattcggaagtattgtactataatgtagactttttcaatgaaaataaattgagtgttccaacgacatgggaggaactgattgcaacaagtgaaaaaattcatgaaattacaggtgcacctgcatttggctgggacaacctggtcggcagttttatgactttggtgaaacaatatggcggacgctatacagatcaggatggaaatatttattttgcaaaagaagatgaagatgttgcgctgaaagttttgaacctttggaaagacaatgtagaagcgggaatctggcgtacagcaggagaagatatgttcttctcaggtccatttgcaaatgagcagattccaatgtacattggggacagtgtggaagcaggttatattccgaataaaaatccagatctgaattgggcaacagctcccgttcctcaggtgagtgaagatacggctgcaaatttaagtgcaggtcatgtcattacagcactgaatacaacaggggatccggaaagagcatatgcatcttatgaattgatcaaatttatgacttcgaaagaggcaaaccttgcagttgttacagcgggaacaggatatttaccgattcgtcagactgtagtagacagtgaggaatatcaaaactatgtgaaagatggacatgatttcttaacagcagcagttgatcagagcgataaatatttttatgagccggcatttacaaatgaaattacaacatccagcgcagtaaacggcgcagtaaaaattatgatgcaggaggttgctgaaaataaagtagatgctgaaacagcattgaataatctgaagcagactgttggcattcagtaaaggagtaacaagaaaaatgaaaatactttaccacgatatcgtgacaccttgcggacaaccggcagatgtggtgatttcagggttgcagaaatttatcagacgaggaatgacggaagaggcagtccgggcagcatatgaattgtttttgacaggagaagagttgacagagtatttgtggaaacgcttattagtaattagtgcagaggatatcgggatgggaaacccgatggctccgattgtggtagaatcgttacagaatgcagcagctcagataacttgtgaaaacccggattatgcaatttttatcgtacaggcagtacggtatctgtgcagttgtgaaaaggaacgtggagccagtattctgagtagtgtaacaaaaaggcggattcgagatggagaagctttcgaatttccagattatgtgtttgatatgcatacggtaaaagggcaggcagaacagagaggaattgaacatttttttgaagaagctgctaaaatttacccacaggtagaatataatgaagaacgtgctgcatactggagagagctggaacaggaattgatccggcgcaaaaaggaggatgtagaggaaaatgaatagaacacttgtgatttcaattgatgcattgattacggcagatattcaaagactcaaagagctgccgcatctgggaaaaatcatgaagaaagcatcctgggtagaagatattttctgcatctatccgactttgacgtatccgtgtcatgctacgattacgacaggatgctggccggatcggcatggaataatcaataatgaaaaatttcagccactggcagaggacagagcagactggttctggttccgggatgcgattgaggttccgacagtgatcgattatgcgaaacagcatggattgacaacagcaactgtcacatggccggtcatgggggcatcgggagcagattataacataggggaaatctgggcgccgagagaagaggatgatccgacaccttggtttgatcaggcaaacagtccgcaagttaagcaaatttttgaaagaaataaacatatgcttcgatggatgaaaactcctcagatggatgagtttgcagcacagtgtgcagcagatattatcagagagtatgatccggatcttttattgctgcatttatcttatgtagatcatcagagacatcgtctgggagtacatagtgaagaacttaccagagcgttccggtttgtggatgaacagatcggaaaagttttagaggcggcagaggaaaaaaatggaataaaaaatacaaatattgttctgcttggggatcatgggcagctgtattgtgatgaattattccacatcaattctttgtttagaaaaaaagggtggatcacggaggaaaacggtgttgtaaaaacatggaaagtttatgcggcgcagtgctccttcagtgcacagatttatctgcagccggaaatggataaagaagaagtttatcaggaactgaaggaaattcagaaagaatatccgcagtacatcgaacaggtatttacgaaaaaagaagctgctgcgaagcatctgtcaggagcatttgattttgtgatagaagcggcagaccgggttgcatttgataaagtggctgatgcagatattcttacaattccggttcaagaggtgaaagaatacaaagcatccatctctacgcatggtcatcttccggaaaaaggggataaaccgccgtttattatgtgtggaccggatgtagttgaaaatcaagtcataaaaggcggatatttaattgatgaagcacctaccattttgaagctgtttggtattgaggcagaacagatggatggaaaagcgttcggattggtgaagcgcaaagaagatgaaaagtagaattttacaggatgaacaaaagaaaattccgaaattgatctgtttcgatttggatggaacgttgtatcaggacaaagtcatctacaagaacatcattacacatttttttcaggacacgccttattatgaatggattgggccgatacaagaaaaaatggacaacatactggaaggaacggaaacgctgaaatgtggacaatttcttccgaagaaacaggcagagtttcctgagaaaatcgaagatttgtttgcggtttccggaacggctgcattattgctggaatctccggaaaaatggctggacaggaaaaaatattcctatatatcggacggctggacgcttgctatgtatctggcaagaagaatcggatgggaaggagagcgcttctgggagcgcttccaaaaagcgagagcggaacttgttggagaaacgtttggtccgaaaccagatgacgaattgcgagaacttttgctgaagctgaggaaaaaagggatttatctggtcctctgctctaacgcaaagaaaagcggtggggaagccttgctgaagcacctgcatttgtcagaatgttttgacgaagttatttttgatgcagataagccgcattctatgagaacaagaatggaagagtgggggatcgatccggcagaaatgttatttataggagatcagggatattttgatctgtatgcgggaaaactggccggagcgagaacgatgttggtttccccgtattatattgaagatcaggggctttgggatattcgaaaaaatacattggaagaattgaaagaatttctgggaaagatgtagcttaaacagagagggaatgacgtaaggcgggcatttcctctctgttgattttggatataacggatcatggcctttcgcaataggaggctgtcggccttataaaaacagaaaaaataaaatataaatttaaattatctgaaaatattgaaatatattaaaaaaagaactataattatactataaatagtgaggaaggagtgtacgattatgacggaagcattgattggaacatgtattttggcaattacaacggtgatatttgtttgggtatgttcagaatatcagatttataacaatgaacattcagcagaagaaaaactgaatgccacgcgattgtctgactggtttgcagcacagaggatgcgcttttggcttgcagtggatgatgcaagagaatatccgcaggaagtgctgaagtcagagaataagacactgcttcaaaactggattgttcggcatcatgaaacacaggagattcgcagtgaaaagaaaagagagcatcgtatgatacagagccagagaacatatcggatgcggggaaatttgtaaaatgatcatctctcaaaaagcagggagagggacactcatcaagcgtccctctccccgctcttttaatatccgcaagatttcaggatcatatccattgtttcagctgtctgtatagaaaaatcagcactgacaagaggtgcttcaccattcaaaatgcagtctccaagttgtttgacctccagcatataattattcgggatatccataaagaaagctgttcttttttccccttcgatcagataccatttctgtgttccctgtgcattgaaagaaaccggcacttctaaaattccttttgtaccgtagataaaagaacggtctccccgctgatgtggaaacatcgcacaagagaagactgcttttttattgtcaggatagagaagatatccgcaggtgacatcatcgatatgttcctctgtaaaatgagaaacggcttttgcagatgtcggtgtttttccaagcagataagatgcaaaggtgatgttatagcatccgagatcgtaaagagatccacccagagtatcccgatgaatgcgaatattatcttcatatcccggtgtataaaatgtggattcaataaagtttacatctccaatcaatccctgatcgatctgaagctttaatttctgcatcaacggggaatgaaggtaagcgaaggcttccatcagaatcacaccggcatccttacatgcctggatcatttctcttgtatctttggcagaaccgctcatcggtttctcgcagagaatgtgtttcttgtgagcggctgcctttaagacccattctttgtgcaggtgattcggcagaggaatataaactgcttctacttcaggatcctctaataattcgtcatagcttccgtaggctttttgaaaatgaaaccggttttgaaattctttggctttttccaggctacggccggcaattgcgtataattcgcagttttgggtattctgcattcccgggattgtctgtccctctgcgatgtgggcagtaccgagaacgccccagcgtatttttctcataaaagttgatctccttccagtgacatccgaaaatcgggtgatttgttatggttatcataacacattctgatggagagaagaaagaaaataaaggaaaaaatccttgcaattccaaattcatacacgtataataaaacggtatggagaacggacagatatggagagttccatgcaaatatttaacgcagtaaaagctgcattattgattaagttaaaagcttaaattttataagttggttactttataaccggtgcgtaaacagcacatcaacttgtgaaacggtcaataagagtattaaaagtaaaatatttgctatatagactcgaatacctttatatctgtagtgcttatacataaatagaaggcaatgatcctgcattttggcaggagagtgacattataaagaagcataacaagcgcaagaaagaatgtagatgtaaacgtacgtttttctgcgctttttttgtgttgaggaacattcagaagtaaaggaaattgacggaaaaagacgaggtgaaaaagatgaaaaaattatcacaggaaaatgctccgatctatgaagcgttagagcggttccggcggatgcggatcgtaccgtttgatgttccggggcacaaacacggaagaggcaacaaagaactggtagaattactgggagaacgttgtgtcagcattgatgtcaattccatgaaaccactggacaatctttgtcatccggtttccgtgatcagggatgcggagcggttggcagcagaggcatttcacgcgagtcatgcatttctgatggtgggaggaacgacatcttcggtgcaggcaatggtgctttcctgctgcaagaagggagataagatcatattgccgcgaaatgtgcaccgcagtgtgatcaatgcactggtgttgtgcggggcgattccgatttatgtcaatccggatgtagatcatcatctggggatttctttggggatgaaagtttctcaggtagaaatggcaattcaaaagcacccggatgcagtggctgtgtttgtgaataatcccacatattatggaatctgttccgatctgcgttctatcgtgaaaaaggcgcatgcacatgggatgaaagtgttagtggatgaagcgcatggaactcatttttattttggggaaaatcttccggtgtcagccatggaggcaggagcagatatggcatcggtcagtatgcataagtccggaggaagcttgacgcagagttcgttcctgcttgtggggccgtccatgcatgcgggatatgtgcggcagatcatcaacctgacacagactacaagtggttcttacctgctgttgtcgagtctggatgtttccagaagaaacctggtgcttcgtggaaaagagtcttttgccagagttgcgtcaatggcagattacgcaagagaggagatcaaccgaatcggcggatattatgcattttcgaaagagctgatcaatggggacagtatttatgattttgatactacgaagctgtcgatccatacattggaaatcgggctggccggaatagaagtgtatgacattttgagagatgagtacgatatccagattgaatttggagatatcggaaacattctggcatatctgtctatcggggatcggattcaggaaattgagcgtctggtgagcgctttggcggaagtgaagagaaggtatcagaaagacaagacagggatgctcagtcaggaatatattgaaccggaagtgattatgagtccccaggattcattttatgcggagaaagaagcagtgtcgatccgggagtcgcaaggcaggatctgcagtgaatttgtgatgtgctatccaccgggaattccgattcttgcaccgggggaaaagatcacaaacgatgtgatcgagtacattctttatgcaaaggaaaaaggctgttctatgacaggtccggaggatgcggcaattgaatatttgaatgttctggtatagggggaagagcaatggaaatgtggttttcagatgagcacacagacaatgtcaaattgtccattcgtgtggataagcagttgttcagcgcacagagtgagttccagcggatcgatgttcttaaatcgaaagagtttggaaagatcctggtcgcggacggggatctgatgctgacagaaaaagatgagtttatctaccatgaaatgatggcacatgtccctatggcagtgcatccaaaggtagagcatgtattggtcattggaggcggtgacggcggatgtgtacgggagcttgcaaaatataacacgatccagaagatagatgtggtagaagcggatccgcttcttgtagaagtctgccggaagtattttccacagatcgccagcagcctggatgatgatcgtgtgacgatctataacgaggacggactgcgttttgtacgctccagatcggatgtatatgatttgatcctgattgattcacccaatccgtttggccctgcagagggcttgtttacaaaggagttttatgggaactgttataatgcgcttcatgaagatggaatcatgatcaatcagcatgagagtccgttttatacagaagaagcatttcaatgtcagaggatgcacaagaggatcatagagtcttttccgatcagcaagatttatcaggcgcacatcccatcttatccgtctgggcactggctgtttggatttgcgtcgaaaaaatatcatccgctcaatgatctggatggtgtttcctggaatctgcggggaatacatacaaaatattatctgccaagagtgcatcatggtgtatttgcactgccggcatatgtggaggagcttgtaaaagatgttgaataaaaatgtaatgacttttatcggatgtgatgccgagtataatgaatcagagattgtattgtttggtgcgccgtttgattctacaacgtcgtatcgcccgggagcaagatttggaagtcaggctatccggaatgaatcctatggattggagacgtatagtccgtatcaggggaaagatctgacggattataaaatttttgacagcggagatctggagcttccgatcggagatactgaaaaagttctggctgagatccaggattgtacggaaatcattttaagcagcgggaaaattccgtttatgatcggcggagaacacctggtaacacttggaagtgtccgggcagctgtcgaaaaatatccggatctgcacatcattcattttgatgcacatgcagatttaagagaggattatctgggagtgcagtattctcatgcctgtgtgctcagaagatgttgggaattgttgggagatgacaggatctatcagtttggaatacgctccggtgacagggaggaatttcgctgggcaagagaaggacatgtaaaaatgcataaattcaatttgcatgggttgacagaagtgattgaaaaactgcagggaaaaccagtttatatcacattggatctggatgtgctggacccttctgtgtttccgggaaccggaacaccggaggccgggggtgtgacatttgtagaactgatgaatgcagtgatcgaagcagcgcagggcgtccatgtagtcggatgtgatgtcaatgaacttagtccgatttatgatccaagcggagtttctacagcagtagccggaaagatcatccgggaatttttgcttgcattgcaggtttaacagaataaacgaaaaaggagatcaaaaatgggaaaagtattgattgttggatgtggtggggttgcaagcgtcgcaatccacaaatgttgtcagaacaataaggtgtttgatgcaatttgtattgccagtcgtacagtgtcaaaatgtgaggcgctcaaagaaaaattacagccctcatacaaagggacgatcacaactgcacaggtggatgcagataacacagaagagctgatcgcattgattgaaaaggaaaaaccggatgtagtattgaatctggcgcttccatatcaggatcttacaatcatggatgcatgtcttgctacaggaacagactatgtagataccgcaaattatgagccggaggatactgcaaagtttgagtataagtggcaatgggcataccgtgagaaatacgagaaagcgggaattacggcccttcttggaagtggattcgatccgggagtgacaggcgtattttcagcatatgcgctgaagcattattttgatgaaattaacgatatcgacattctggactgcaatggcggagatcacgggtatccgtttgcaacaaatttcaacccggagatcaatatccgtgaagtttccgcaaaaggatcttactgggaggacggtcactgggtagagacagaaccaatggagatcaaaagagaatacgattttccggaagtaggaaggaaagatatgtatctgctgcatcatgaggaaatcgaatctctggctttaaatattccgggaattaagagaatccgtttcttcatgacatttggacagagctatctgacccatttgaaatgtctggaaaatgtagggatgacatccattgagccgatcatctatgagggaaaagaaatcgttccgctgcagtttttaaaagcagtgcttccggatccggcatctttaggaccgagaacaaaaggaaagaccaacattggatgtattttcaaaggaaagaaagatggaaaagaaaaaaccatctatatttacaatgtatgtgatcatgaagagtgctataaagaagtgggatctcaggccgttgcctatacaacgggcgttccggcaatgatcggtgcgatgatgctgatgacaaaaacatggaacaaagacggtgtgcacaacattgaagagtttgatccagatccatttatggaggcgcttaatgaatttggacttccgtggaaagtagtagaaaatccacagatggtagattaagaattggatgcggcaaatgaaacgggaagaattaagaactccatgttatgtgatcatggagtcagagcttaaaaaaaatctgcagattttaaaggaaatccgggagcggaccggctgtaagattctgctggcacagaaagcattctcgatgtattcgtgctatccgctgatcgcagaatatctggatgggacaacagccagtggcttgtatgaagcaaagcttggaaaggaatgtatggagaaagaaaatcatatcttttctccggcgtatcgggaagatgaatttgaagaagtgctggacaactgcgaacatctggtgttcaattctttttcccagcttgaaaagtttggtgaacgtgcggcaaatgcggggaaaagtatagggattcgtgtaaacccggagtgctccacgcagaaagaacatgcgatttatgatccatgtgcgccgaactcccggcttgggattttggcatctgaatttccggaaacgctgccgtcgtatgtagaagggctgcattttcatacactttgcgagcagaatgcagatgcgttggaaattacactgagagctgtggaagaaaaattcggaagctggatgtcacagttcaaatgggtgaattttggcggaggtcatcatattacaagagacgattatgaccgggaactgctgatatcctgtatccgtcatattcaggaaacttatcgtgttcaggtttacctggagccgggggaggcagttgcactcaatgcagggcatctgctcacaacagtggaggatattgtacacgatcagattgccgtgttggatgtttccgcagcctgtcatatgccggatgtgatcgaaatgccgtatcgtccgcctttgtttgattctggagaggcgaaggaaaagagatatacctatctgctgggcggtccgacctgcctggcaggagatgtgattggaagttattcttttgatcggccgctgaaggcgggagacaggctgacatttggcgatatggcaatttatacgacagtgaagaataacacattcaatgggatgcgtcttccggatattgtatgggagcgggaaaacggagaatgtgaaattgtaaagtcgttcggttatgaagattttaagtgcagaatataattgtgataataagtgaataaaataacaggaaagtcaacaaaataacgattgttgactttctttttttgtgtgataaattgttattgtgcataaaaatacaaaataatatatttgaataacagacagtaaagtgaggagttgtgataacaatgggactgcacgtcattgacgaagcaaaaagatgtttaaactgtaaaaaaccgagatgtcaggaaggatgtccgatccatacccctatccctgcaatgattcagatgttgttggaggggcagatgtcagaagcggcagagatggtattttccaataatccgctgtctgtcatttgttctcttgtctgcgatcatgaaaagcagtgtgaaggacattgcgtgaaagggatcaaaggagaaccggtgcatatttcttcgattgaaaattatatttccgatacctgtttcgaccgtatgaaactggagcagcttccgaaaaatggaaagcggattgcagttgtgggagcaggacctgcaggaattacgatcgcaatcttgatggcgtgcagaggatataaagtgacgatttttgaggtgaaagaaaaaatcggaggaatcctgcgttatggaattcctgaatttcgtttgccgaaatccattctggatcgttattatgtgaagatgaaagagcttggtattttgtttcggcctaattttgcgttgggaggttctactggtgtggaagaccttttgcgggatgggtaccatgcggtatttatcggaacaggaacatggagaccttatcagctgcatataccgggagagacatttggaaatgtgcattatggaatcaattatctgaacaatccagatgtatatgatctgggagaccgggtacttgtgatcggggcaggcaatgcggcaatggatgtggcaagaacggcaatccgaaaaggggcacggcatgtgacagtttattcgatcacggaaattccggcagcgtcccagaaggaagtagagtatgcgaagctggacggggtagagtttgaatatttgcagacagcgattgaaatccgggatgagggagcggtgatctgtgatgtggaatggacagaagatgggaaactggtgaaaaaagaagagactgcccgtcttgttttggcggacagcatcatcatctccatttctcagggaccacaggatcgcattgtgaaccgggataaagcgctgcaggtagatgagagagggctgttgaagacagatgcgaacggagagacgaccatgccggggatttttgcatccggggatgtggtgacaggtgccaaaacagtggtggaggcagtgaagtattctaaaatgatcgcggatgcgatggatgattatgtaaaaacacattacaaataaagtggggctgtcgcactaaataattagtgcgcagcctcttttctatgcaaaaaattacagccaggcttcgaaaagcctggctgttggtgtaaaatataagtatgcaaacccctatattattacacaagaattatactttgaatgaggaaggatatcaactaaaacttcctttaaacttagaaacaattattccagtagatgattctgtgcggttgctgagtcagtttgtggaggctatggatttaacggacttatattctacttatgaaagaataaatacagtatcgccaagaacactcttgaagattgttttatattcctatatgaatggtgattattcctctcgctctatggaattgaactgtaagcgagatattaatttcatgtatcttttagagggaaaaccagttcctgaccatgccacttttgcccgtttccgaagtattcattttgctccgtgtgcgaaacgaattctcgctgaaatgtctaatctcctttacggacttggagaaatttcgggagaaacgatttttatagacggtacaaaaatcgaagcctgcgccaataaatatacatttgtatggaaaaagacggtaaccaaaaatcaggcgaagttgctgattaaaatcgccgatctcattgcagaatgtgagcaactttatggtattcggattgttcacggtgatactgttaaaatgaaacacgtaaaacggttacgcaaaaagctgtacgcattaaaacaagaagaaaacattgtatttgtacatggtattgggaaacgaaaaactcagctgcaaaagagtatcgaaacattagaagactatctggaccgtttaaaaggatatacaaaaaaactgcatatttgtggaaaaaggaacagttattctaaaaccgatccggatgccacctttatgcggatgaaagaagatgcaatgggaaatgggcagttaaagccagcatttaatttacagcatggagttgattctgaatacattgtatggctgacaatcggaccacagcccacagatactaccaccttaattcccttcttaaaggaaacagaagaatatctgacatttaagtatcaaaaaatcattgcagatgctggatatgaaagtgaagagaattatgtatttctagatcaaaatcagcagttggcatttatcaaaccatcgaattatgaaatatcaaaaaagagaaaatataaaaacgacatcggccgtatagaaaatatgaagtatgatgaaaaaagtgactcttatatttgtaaaaatgggaaacagctgccctttacacatctccgtcgctctaaatctaaaactggatatatcagtgaaaaaaacatttatcaatgtaaagaatgtaaagattgtccttacaagaaagagtgcatcaaggggaataactgtaaaacaccaatagaagagcgaaacaaagtgctttccgtagcaaaaacatttttgaaatatcgggaggaagatttggagcggattctttctgacgaaggaattcttcttagaataaatagaagcatccaagcagaaggatcttttggtgaactgaaacaggatatgcagtttcgcagatatttgagtcgtggcacagagaatgttcttgctgaaagtgttttgctggcaatggcaaaaaatgtaaataaacttcataacaaaatccaaaaagggaaaactggaaggcatttatttcctttgaagagtgcataaatttagagaatccgaaatttttttcaaatccagttttggattgtattaaagtacggcttttttacgaaaaagctatcgtttcaatagaaacagagcaactatatagcgaaaatcagaaaaaaggaagctgccgcttcacgatttgctaatcgttaaagcgacagccccatgtttattttaaggaaaaatccatgtaaacaggattgtggtcactccatttgaatccagtatccagcaccagggcatcctctacagttacgttgtcagatacaagaaaaccgtctacagtaactacaaagttggattcgctgtaaggctggtctgcattccggcaggaaggaacaggatcggattcatcaaacggtgcgatcagctgcatgaaatcaggaatcagctcatcggaaattggttttgcccagttgtcttctaattcttcatgaccaaaagtttcagcagaatttccgagcaggtctttattgaaatcaccgcctgcaacaatataatttcccgcgtcatattctgttttcatatcgtcaaataacattcgaagctggttgtccgcagttttcggatcagaagtataggctgaaagatgcagattgtataaaagaagttcctttccgttttcggcaggaatccgattcacactatagcatcggtccagatccagtaatttcataaatccaccttcaatcggcagggagcgcctgatggattcggcgatctgcattgttgaaacagtaagcaatcctgctttattctttccgtgtggttccagaatagggtaaaacaggtaaggactgtcataattctgagcgaatgtataaactagtggaatatcttctgactgaagcgctatcaaaaggagcggacgctggtctacatggtagcttcttgtaccatcaaagtcgacttcctgaaaaaatgcaaaatcaggcttcagttttgctacagcatctgcgtagctgctgacattttcaatgacagcttctttggaacgtgcccggctctcttttcctccatccataaagaaggaataatcgtcactgtatgcgccgaagccgatattgccggatgtgattcggtatgttttttccagtttggctttttcatcggacttccctgtaatggacagattttgtttgtcttccagacggtaatagctggcaaacacgtaaatgacgtatccgattccggataacagcagaatgccaagcacaagagctagtcttttcagccatttttttgaagtacatttcataggtgatatcccctttctgttttgtaaatttaggctttgaaaatcgtaccgttttatgtggctattatatcatatttcatttgatggtggtataatggacaaaaatgatcagcagaaaaaatgaaaggataattattatggaagaaaatcaaagattttcagatttgatcagagcgcaaaaacacttttttgcgtccgggcagacaaaagatcttgcctttcgaatctgccagctgcagattctcggagagtctatacgaaaaaataaaactgctctggaaacagcgctgaaacaggatcttggcaaatcggcgttcgaatcctatgctacggagattgggtttgtattggctgatatccggtataccattcggaatcttcagaaatgggcagcagaaaaacggattggaacaccggtatatttatttcccgggaaaagtaaggtgcaaaaagaaccgtatgggagcgtgcttattttagcgccgtataattatccggtacagctcttgatggagccgctgattggagcgattgcagcggggaactgtgcagtgcttaaaccatctgaactgacgccctgtgtttcgtcctgtctttatcaaatgttgcattctgcctttgaggagaagtatgttgcctgcatagaagggggtgtggaggtcaatcaggaattgctttctcaaaaatttgattatatatttttcacaggaagtgaacgtgtcgggaagattgtgatgaaggctgcagcggagaatctgacaccggtgactctggagcttggcgggaaaagtccggttattatagaaaaaagtgcaaatataaaagaagctgcaaaaaggattgcatggggaaagttgatgaatgcagggcagacttgtgtggcaccggattatgtgcttgtggatgaggccaggaaagatgaatttttatcagagtttcagacggcgattttccatttatatggaaaagagatcaaaaaaaacccggattttgggaggattgtaaataccagacatgtagaacgtctgaagcggattctggagcaggatgcaaactatattgtgtgcggaggtgcagcagatacagcggaatgttatgtggaaccaacggttttagatgttgggcagaatgcggatgccgcatcgatgcaggaagaattgttcgggccgatcctcccggtgctttcttatcgtaaactggaagatgcggtacattttatcaataaaagagcaaaaccactggcgctgtatttgtttacaagaagaaaatcagcagagagatttgtgctggatcgtgtatcttcaggaggggtatctgtcaatgacacgatcagtcatctgatcaatcccaagcttccgtttggcggaattggagcgtctggaatcgggcggtatcatggaaagtatagttttgatacatttacgcatgagaaaagtatattttgtaaaccggccgactggaatctgccggtatgctgccctccatttacaaaaggaaagatgaagttgattcgatttttcctaaaatagtggattccagtgatataaggaacagataattcgaacgaacttaagggttcggcagagatgctgttttgttttggataaaattctggtgaaaagagtgaattgtctgaattgtgcgaaaaaaataaaaaacagaaaaaacattgacaattcacttttcccatgataagataccacttgtcgctgaggcagaccgatgaaaagaacaagcccaagggccgctgtgggacaggatgcgagagcagatcgctgtacaaagtgaaaaaagttcttgacaaagagaagtcaatgtgataatctaaataggctgacttgtgagggagaaaaaatccggaacagacagcgaaaagaaaaataaaaaagttcttgacaaatgagaaacagcgtgataaaatatcagagctacttcttataaacgagaacagcgaagaaccttgataattaaacaatagacaacaaccttgaaaatttcttaagagaagattttttaagaacagcatctaagagatgcacccgtcacatgagaatgtgacagacagtaaaagggatgaattagctagtagttaattctgaccggaacgaacacttttaacgagagtttgatcctggctcaggatgaacgctggcggcgtgcttaacacatgcaagtcgagcgaagcacttttgcggatttcttcggattgaagcaactgtgactgagcggcggacgggtgagtaacgcgtgggtaacctgcctcatacagggggataacagttggaaacggctgctaataccgcataagcgcacagtaccgcatggtaccgtgtgaaaaactccggtggtatgagatggacccgcgtctgattagctagttggtggggtaacggcctaccaaggcgacgatcagtagccgacctgagagggtgaccggccacattgggactgagacacggcccaaactcctacgggaggcagcagtggggaatattgcacaatgggggaaaccctgatgcagcgacgccgcgtgagcgatgaagtatttcggtatgtaaagctctatcagcagggaagaaaatgacggtacctgactaagaagccccggctaactacgtgccagcagccgcggtaatacgtagggggcaagcgttatccggatttactgggtgtaaagggagcgtagacggcatggcaagccagatgtgaaagcccggggctcaaccccgggactgcatttggaactgtcaggctagagtgtcggagaggtaagcggaattcctagtgtagcggtgaaatgcgtagatattaggaggaacaccagtggcgaaggcggcttactggacgatgactgacgttgaggctcgaaagcgtggggagcaaacaggattagataccctggtagtccacgccgtaaacgatgaatactaggtgtcgggtggcaaagccattcggtgccgcagcaaacgcaataagtattccacctggggagtacgttcgcaagaatgaaactcaaaggaattgacggggacccgcacaagcggtggagcatgtggtttaattcgaagcaacgcgaagaaccttacctggtcttgacatccctatgaccgctctttaatcggagctttccttcgggacagaggagacaggtggtgcatggttgtcgtcagctcgtgtcgtgagatgttgggttaagtcccgcaacgagcgcaacccctatctttagtagccagcattttggatgggcactctagagagactgccagggataacctggaggaaggtggggatgacgtcaaatcatcatgccccttatgaccagggctacacacgtgctacaatggcgtaaacaaagggaagcgaacctgcgagggggagcaaatcccaaaaataacgtctcagttcggattgtagtctgcaactcgactacatgaagctggaatcgctagtaatcgcgaatcagaatgtcgcggtgaatacgttcccgggtcttgtacacaccgcccgtcacaccatgggagtcagtaacgcccgaagtcagtgacccaaccgtaaggagggagctgccgaaggtgggaccgataactggggtgaagtcgtaacaaggtagccgtatcggaaggtgcggctggatcacctcctttctaaggagaaagaagtagaggaagtaagagctattgtttaattatgagggttcatcaagaactcaacttttttggtggcgatgcgctcaggggaaacacccgtacccatcccgaacacgatggttaagacctgagcggccgatggtactgcactggagacggtgtgggagagtaggtggccgccaaaactaaaaaagaaaaaagacaggtttcggaatgaaacttcagatatccaggttcgaaaggaccttaccatgaaatctgaagtagcaaccgactaacgtgtgaaaagaccacacgaagtctttaggtatagatacaggcatagatgagcaacaacttatcgccgccaacccgatcagcagggaagtgctgttagagataactggtttcaccagtgattagagattaaaagaggttttagtttctaatgactgatgaaaaagcagtcagatgtaccttgaaaattgcatacaaagagaaatatcttatgaaaataagagagttgaataaaattcaacaagacatccgaggtaatgttaacaacattataacaaaacaaactattaccaacgcatgtaacgctatacatgtgtcgatgagaaaccaacccgtgtttcttgtcagttggttatgctaataagagcgtatggtggatgccttggcactaagagccgatgaaagacgtgataagctgcgaaaagcttcggggaggagcaaatatcctgagatccggagatatctgaatggggaaacctacttgagaagacctcaagtatccacagcccaatccataagctgtggaagggaacccggtgaactgaaacatctaagtagccggaggaagagaaaacaacatgtgattccgtaagtagcggcgagcgaacgcggaagagcccaaaccggagtgcgtgcactccggggttcggactgcagaatcgatgagtgagcctagtagaatggttttgggaaagccagccagagagggtgaaagccccgtacacgaaaggcgagcgagcgaagcaggatccagagtaccacgagacacgtgaaaccttgtgggaatgcgcggggaccaccccgtaaggctaaatactccttagtgaccgatagcgcatagtactgtgaaggaaaggtgaaaaggaccccgggaggggagtgaaagagaacctgaaaccatatgtttacaagctgtggaaccgctttatatgcggaaccgcgtactttttgtagaacggtccggcgagttacgctggctggcgaggttaagcactgaaggtgtggagccgaagggaaaccaagtctgaagagggcgaaatagtcagtcggagtagacccgaaaccgggtgatctatccatgtccaggttgaagttgccgtaaaaggcaatggaggaccgaacccacatccgttgaaaagggtggggatgaggtgtggataggggagaaattccaatcgaacccggagatagctggttctcctcgaaatagctttagggctagcctcatgcaagtcttacggaggtagagcactgaattcctaagggggcgtcaaagcttaccaagggatatcaaactccgaatgccgtgtagatggtgcatgggagtcagactatccgagataagttgggtagtcaaaagggaaagagcccagacctacagctaaggtcccaaaatgtgtgttaagtggaaaaggatgtgggatttcgaagacaactaggatgttggcttagaagcagccatccattaaaagagtgcgtaatagctcactagtcgagaggtcctgcgccgaaaatgtccggggctgaaacacactaccgaagcttaggaattgatgaatgtcaattggtagaggagcattcttaacggggcgaagctgtaccggaaggagcagtggactgttaagaagagagaatgccggaatgagtagcgagaggaaggtgagaatccttccggccgaatatctaaggtttccagagtaaagctgatctgctctgggtaagtcggggcctaaggcgaggtcgaaagacgtagtcgatggataacaggtaaaaattcctgtactatatcataacagaactgtggggacgcagacagagagcataagccgggaatggaaaaaccggtacaagcgaggtaggagtgcatcaggcaaatccggtgtacaatctgaagacgtgacgtggggcgtaaagccggaagtatgtgagctggctgccaagaaaagccgctattgtttatgatatacccgtaccgtaaaccgacacaggtggatgaggagagaatcctaaggccgacgggagaagcattgttaaggaactcggcaaaatgactccgtaacttcgggagaaggagtgccatgtaaaagtggccgcagagaattggcccaagcaactgtttagcaaaaacacaggtctatgcaaaaccgaaaggtgaggtatatgggctgacgcctgcccggtgctggaaggttaaggggagaggttagtcgtaaggcgaagctttgaacttaagccccagtaaacggcggccgtaactataacggtcctaaggtagcgaaattccttgtcgggtaagttccgacccgcacgaaaggcgtaatgatttgggcactgtctcaacaatgcacccggtgaaattgaaataccagtgaagatgctggttacctgcgccaggacggaaagaccccatggagctttactctagcttgatactgggattcgatattgcatgtacaggataggtgggagactgagaactgatgacgccagttgtcagggagtcactgttgggataccacccttgtagtattggatttctaaccagcagccgtgaaccggctgggggacaatgtcaggtggggagtttgactggggcggtcgcctccgaaagggtatcggaggcgctcaaaggttccctcagaatggttggaaaccattcgaagagtgcaaaggcagaagggagcttgactgcgacaccgacgggtggagcaggtacgaaagtaggacttagtgatccggtggtataaagtgggattgccatcgctcaacggataaaagctaccctggggataacaggcttatcactcccaagagttcacatcgacggagtggtttggcacctcgatgtcggctcatcgcatcctggggctgaagtaggtcccaagggttgggctgttcgcccattaaagcggtacgcgagctgggttcagaacgtcgtgagacagttcggtccctatccggcgtgggcgtaggatatttgagaggagctgcccttagtacgagaggaccggggtggactggccgctggtggatctgttgtattaccaaatgcatagcagagtagccaagccgggacgggataaacgctgaaggcatctaagcgtgaagcccccctcaagatgagatatcccataacgtcaagttagtaagaccccttgaagacgacgaggtagataggtcagaggtggaagtgtggtaacacatggagctgactgttactaataggtcgagggcataaccaagcaaggtgataggaaaaaggatgggttctttgtatgcagttttgaaggtacaggatatatagatggaatgagagagcagcaccgtcaggtgttgtttttttctatataaatgttttaagaggagattacagaagatgaaagaacggggaaaacgcctggttcaatatacgccagattatacagtatttgatctggaaacgacaggaatcagtgcccatacggatgatattatagaaatatctgcagtaaaggtgagaaatagtgttgtacaggatacattttcaacgttggtgaatccggggagacatattccggcgcaggcaacgaaagtaaatggaattacggatcagatggtatcggaagctcccggtattcgtgagtccatgcaggcatttttaagatttatcggagaggatattctggttgggcataatatccagtcttttgatatgaaatttatttatcggaacgtggaagaactgtttcaagagaccgtttccaatgattttattgatacgctgtatatggcaagaaagtgtctgccggagttaaagcatcatcgtttgacagatttggcagttcattttggaatcagttcgaaaggggcgcaccgggccttgaatgactgtgtgatgaatcagaagtgttttgaggcaatggcaaagcttcagaaaaaatcagaagtgtttgtttgcccgaaatgtggtggagagatgattcgaagaaatggaagatatggggagttttggggctgtgggaatttcccaagatgtagatatacgcagaatgtgtagactgaagtggagggtatacgttaaaaaggaagccaaatacaaaaggttacaaaaaaacggaaactattgcaggggtcaatcgtttccgttttgaaaattcaatcattacaatgcaatgaatccgcttttctcttttccatatgtaaaatatgctttttgatcttccggtttcagatagatggagatggtgctcatctcttcatcggaagctccggcagctttacaagcttcttttaccttggaaataatctctgtttccagatattcctgatcgtgatactgaataaaaaagtgaactgtctcctttggtacagcaggagcgactggaatttctgcaacaggtgcttccattgttgtgttctgttttttcatttttttcttatccatacgtttattcatatgacaaatacctcttctcgtttagtttctcgaataaattatagtacttttgaaagcagaagtcaaaatagatgaggtcttaaggattgatctggcgcagcatttccagaagctcgatatcttctggttttaattttaaattggaagaatagtgctttccatccggagaagttacattgatctctatgatggtatcttcttttaatgcgtctgcagaaacagcattcagaaagaggggaaattttgggtgattgtttcgaaatgtctggatgctgctgcgaagcttttgaagcattgccagttggttaaagtttaatgccataattgatactcctttatttttccttatcatagcttagtttattcagaatggcaagtagaatgcttaaaaacgacaaatattacatataattaaaaaaaacaaaaaaatttaaaaaatttaaaaaaaggggttgcattttaaaaatgtgtgtggtattataattcttgtcttgagggacacaaaaaaataaagaaacatgcgggtgtagttcaatggtagaacaccagccttccaagctggatacgtgggttcgattcccatcacccgcttttttgatgcagacggggcgaaaaccgagaaaaacggttttcgccttgtttttgtaaaagaaagggttgaatcgtgaagtgagcatgatacaataaaaagaaaagatcaggaggaataaaaatggatcgtaaagtgatgcaaaagatgacgtatggattgtttgtattgactgcgagagaaggcgagaaagacaatggatgtattgtaaatacggcttctcaggttacgacaacgccgaatcggatcattgtgacagtcaacaaagaaaactatacgcatgacatgatacagagaacaggggaattcaacctgtctgttttggatgaatcagcagaattttctgtatttcaaagattcggattccaaagtggacgtgacacagataagttggaagattttgtttgtccacgttctgagaatggaatcgtatatattccggagatgaccaatgcatatatttctgcaaaggtgatttctgctatggatttaggaacacatacaatgtttctggcagaggtgacaggcggggatgttttatccgaccgagaatctgtttcttatacatactatcataaaaatatcaagccgtcggcgaatgtaaaaaagaaaaaaggatggatctgtcagatttgtggttatgtatatgaggaagaggtattgccggaggactttatttgtccaatatgcaagcatcctgcatcggattttgtaaaattataagagaacaatagaaaagagagttgaaaaatgaactggttagataacggagtaacacgttttttaggaaaagtagcagattttatgattttaaatattttgtggatcgtatgttccatccctattattacgattggggcatcgactacagcaatgtattcggttatgctgaaactggtaaaaaatgaagaaggatatattgcaaaaggatttttgaaagcattcaaagataacttgaaacagagcacattgatctggctgttatatctgatttttggaattgtgatcgcagtagacttccgcttactgggcatcatgaatccatcgatcagaacggtgatacaggtatttctgatctttatgagtattcttctgatcagtatgggaatttatggttttgctctgcaggcgagatatgaaaacacggtcaagaatacgttgaaaaatgcgctgatccttaccgttgccaaaatgccgtacacactgctgatgctggtgatcacagtggctccggtgatccttacatttttgaccgtccgtacgctgctgtttggaagtctgctctggatgctgctcggtgttgctgttgtggtgtggctgaattccatgattttacgaaaagtatttttgatttttgaagatgcagaagagcccgatgaaacagaaaaagtataagccagataaaatcagttgtttttcacaagaaaaacaggtataatggggaacaaaatcaaaaaagtgattgggagaagcagaagatgaattttttagaagaacgaattttaaaagacgggattatcaaagagggaaatgtactgaaagtagacagttttttgaatcatcagatggacattgatctgtttaatgagatcggacgtgaatttaaaaagcgttttgagggcaaagagatcaataagatcctgacgatcgaagcatccggaattggaattgcatgtattgcagcacagcattttgatgtgccggttgtatttgcaaagaaatcacagagtatcaacctggagggggagatgctggtagcagaggtagaatcctttactcataagtgcaagaacaatgtgatcgttgcaaagaagttcctgagtccggaggataaggtactgatcattgacgacttccttgccaatggctgtgcactgcagggactgattcagatcgtgcagtctgcaggagcttccgtagagggaattggaatcgtgatcgagaaaggattccagtccggaggacgaatgatccgtaatctgggatttcagctggagtctctggcgatcattgataagatggatgcagcagatggaagtattgtgttcagagagcaataggaaaggaaaaaggtcagtcagatgagtgagcagccgatacagggacttgtatttgatatggacgggcttctctttgattccgagcgagtggtgcaaaaagcatggaacgaggtcggaagacagatgggatttggcgaacagttcggggatcatatttaccatacgatcgggtttaacgtagtcagaagagaagcatattttaaggagcatgtatcgccggatttcccgatggaagcgtttacagagaacacccgccggatttatcaccggatcatggaggaagaaggtgtggacagaaaaccgggggcagaggcgcttttaaagtatgcaaagggacatggatatcggcttgcactggcgacttcttccagagagcttcatgcacagcttctaatgaaaaaatatgggttgtttgactattttgacggtgcagtttatggcaatatggtgtcggcaggaaagccggacccggagatttatcggaaggcctgtgcatccattcatgttttaccggaatttgccattgctctggaagatgcaccatcaggggtacgttccgcagcggcggcgggtatgcgccctgtgatgataccagatctggtagagccggatgaggaaattttaaaattagtatggcatcggtttgatacattgtatgatgtgatcgatcttttggaatcaaagttccaaaattcttaaatatcctttagaaattcttttgaatcttataacggtctcctttatttttgtattttaagataaatacaaaagtaagggaggccgttttctatgagtatccagacattaacaaattattttcttgaatatggagcatttttcatttttttgatcgtgcttttagaatatctcaatcttcctggatttccggcaggagtgatcatgccgcttgcaggaatctgggcatctcagggagaaatcagtttcccgctggttatggtgttgacagtggcggccggactgacagggagctgggcgctgtactggctggggagagcaggaggagagaaagtactcggattttattttaagaaattcccaaaacaaagggatgtggttgagagcaagattacgatgctgcgggagaagggaagtgtgggggtgtttgtgagtaaactgcttccgatggtgcggacgatcatttccattccggcaggcatggtaaaaatggattttatgaagtacacgatcagctcctgtatgggaattttgatttggaatctggtatttgtaggagccggatatttcttcggagaagcagcaattcgcgttttagcatagaagagggggaaaacatcatgaagattgcaatgcttacaaacaattacaaaccattcgttggaggagttccgatttcggtggaacgtctgacaaaggaattgagaaaacaaggacatgaggtgacggtatttgcaccggattacggatttgatccggaatatggacaggtgaaagaagaaggtgtgatccggtttcaggtgacccgccataagatggaaaatggtatggtttatcccaaattgatcagcagagaaatccggaaagcgtttgaagagcagcagtttgactgcattcatgtgcatcagccgatgtttgttggaacacaggcattgtatcttgggaggaaataccagattccggtaatctatacgtatcatacacgttacgaagattatctgcattatattcctttgttcaaggaggagcaggcagggagatggagaaaagagctgattcgcttgggaaaagaatatgtggttccgggatatatgaggtggtttaccaatcaatgtgacctcgtttttgcgcccacaccgggaatgcagaacagaatacgggaaaacgggacagaggttcctatggcagtgatgccgaccggtctggatgacagtttttatctggaagataaagagaagacaagagcaatccgcagaacctatctgggagatgaaaaatccgggcacttattttgttcggtttccagattggaggaagaaaaaaatccggtattccttttaaagggaatccggtgtctgaaagaaaagctgcctttttcatttcgggtattgcttctgggggaaggcagtatgagaaacgaattggaaatactggccgggcgtatgggacttgaagataccgtcgtttttcttggcaatattccgaatgaggatgtgaaacagtacctatatgcaagtgagctgtttttatttgcttccaaatcggaaacgcagggaattgttttagaagaagctatggcagcgggaaatccggttgtggcagtcagggcaagcggagcagaagatttgataaagaacgggatcaatggatgtatgacagaggaggacgtggaaatctggagtaccaaagcggcagagttgattcagaatccggattacggacagatctgtatggaagcaagaaaaactgcagagagctatcgggcatccagactggctttgcatgcggagttattatatcgtcagtgtatggacagaaaagaggaaataggatatgagagagagacaaacagtgggaagaaacattctgcagcatctgttttccggttatttaaagcttcttaaaaagaccgttacagtgcaatggcaggaaaatcaattcgtcacaggaaatcaggtgtttggattctggcatgaggacagcttttttatgaatctggtattggcggagttatccggtcagaccagtccggtcgatgtgatcgtaacagcagatacaagaggggattatatagagcatatgttaaagtcatgtggagggaatgctctgcgggtaccggatggatttgcggcatttggagtcctgaaaaaaattctgcagaattcttatgagcagacacgttcgatcgcagtggctttggatggtcctttgggaccaaggcatgaaccgaaaaagctggcattttatctggcagagcaggcgcaggaatcatttgtaggaatttcagtttcttatcacggatgtattcgcttgttctggaggtgggatcattatgcgattccattgccgttttcaaaagtcagtgtgtcagtccatgattatggggaagttcataaaaaacaaattccggaacttcccataactgcagaaaccacagaaggaacaaatcgtggtatactgttaaaagatgcataacggcacaaaatgacgaaaaaaaggagacagatgagagatggaaatgaatcacattttggttgtggaagatgataaagaaatcagagagggtgttaagatttatctgcaaagtcaggggtatgaagtgtttctggctgcagacggtgtagaaggcttggaagtgatggaaaaagaggagatccatctggcaatcgtggatattatgatgccaagaatggatggaatccggatgaccatgaagctgagagaaaaatacgattttccagtgatcatgttgtcggcgaaatcggaagaagtggataagatcatggggctgaacattggtgcagatgactatgtgacaaaaccgtttacgccaatggaactgatggcaagggtcaattctcagcttcgcagatacagaagatttatggagaaactggaagtccgtgaaaatgtgcatattattggcggtctggaaatcaatgaggatactgtggaagtgtcaattgatggaaaaccggtgaagctgacgccgatcgaatataagatcctgcttcttcttgccaagaatccgggacgggtattttcagcagaagagatctatgaacgggtatggcaggaaaaagcgatcaatacagatacgatcatggtacatgtacgaaatatcagagagaaaattgaactggatccgaaaaatccaaaatatttaaaggtggtgtggggtgttggatacaaaattgaaaaacaacaataaaaaggggaattttcttgcagtccttatattgctgatcgcatccatcgggatgttgtgcttttacccgtctttttcttcctctgtcaaagatgaggatcgcaaagagatgcgaaaagaagagcagatgattgaaatgctttctccggtgctggaaggaaattatttcctgtacaacgagatttcaaatgaggtggattcttccgatatgatggaggaatatcggaacagccagtttggacttatgaaaaagtatatgaaatacggtttgtttgatgaatctggaattgcactgatcgcatcggatgaatctggagaaaaattactggaagaatttaacagtggtaaatatgcgctttgtatccggttttcttttgattatgaaagtgaaatttctgagattcaggtgggaggaactgcatacaataaggaattgcagttttcagcagaacgcaggctatataatgacagtctttataccaatacgtatctttctacgccaacagatgtagacattgtatatgcgatgacggaaaaaaatctggaagcctatctggaacaggaagagatgccggaatatgtgtatgtggatgaattgatgcagcagccgtctttttgctggtcgattctgacttttgtggtgctgagtgcagcagcagcttttgtgatcccacagtataagaaacgtactctggaaaagggaacagtcgttgattcacgaaagtgtcctctggaaattgcaatcatcatcggatgttgtatgataccttgtgttcgtgcactggcgatcatgatatggaatacatgcaatcacaagtttatccggatcttttctgcaagttatggagagaatctgaacgatgcaatttctctggcagtaaatgcagtgatctggtttgtatattttgcagtggtatactggatggcaggatgtgtcagagagatttttatattgaaaaaatcgtatttaaaagagagatctctgtgtgtgaagtttttcatgtggctgaagagtggaggaaacagtgtgacaaaaacagtgaaaacgtttgttgtcggatgctggggaaagttcagagcgttctgtcatcatcaatatgaagctctgttgcacattgattttcgagataacacgaataaagcgattttacggatcgtattgatcaatttcgctgtgatttttgtcatcagtatgttctggatgtttggaatctgggttttgatattgtattcagcagggctgtttatttttctgaggaagtatttcaacaaagtacaggagcagtatcaggggcttttaaagtcaaccaatcagctggcagaaggcaatttggattttccgatcacgggagatgtgggaatctttacaccggttcagaatgaattgaaacgaatccagacgggatttaaaaaggcggtcagtgaagaagtaaaaagtgagcgtatgaagacagatctgattaccaatgtctctcatgatctgaagacacctctgaccgcgatcatcacgtatgtggacctggtaaagaatgagaccgatgaggaaaagagaaaagaatacatcggggttttggaaagaaaatctttgcgattgaaagtgctgattgaagatctgtttgaaatcagcaaagcgaccagcagaaatgtgacacttcattatatgaaagttgatattgtagatttgctaaaacaggtaggtttggagtatgatagtaatatcagaaatgcaaatctggaaatgaagtggaatctgccggagcataagatcgtattgtggctggacagtcagaaaacatatcggatctttgaaaatatgatcgtcaacattacaaaatatgcaatgccgcatacccgggtgtatattgatatgaaagagactgagcaggatgtaaggatttcgatgaagaatgtttcttctgcagagttgaattttaatacggacgagatcacagaccgtttcgtcagaggggatgtctccagaaatacggaaggaagcggacttggtctggcaatcgtaaagagttttgtagaattgcagcacggtacactgcagatttccacggaagcagatttgtttaaagcagaaattgtgtttccaaagagacaggaggtaccggatggagaaattgaaacaggaatggaacgttaaaaaaccgttgaagatctggcagggtgcagtcaccctgctggtttctgcggttcttttatttgtagtggcgccaagggtgttatccccgtttggcatgtacggaagtctgattggagaactgttgctgcttggagtagcagcaggtgcagttctcttgtttcgtggggatttcaaggaggtattccccatggagagaccttgtttttcagggattgcaggaacgattctgatctgggtaggaacgtttttatgcgagatggtacttttgttgattttaagcctgttttttccagaacagatcctggaagtcaacgatggattatccacatccattgccgcagggccgttttggctgtcttttgtgacggtggctatttctccggcaatctgtgaagaagcactgtttcgggggacatttgtcagcagtctgcgtggacgcctggggaaatgggcagtactgctgatcagcggatgtattttcgggatgtttcacggggatatttttcgattctttccgactgcgatcggcggtgtgatgatgggatatctgttatgggaaaccgggaatttgttttataacatgctgtttcattttatcaacaacgcactgcctgttatattactctatgccatgcagggggtgtattcgaagatggagctgtacacagaaatgcagtccattgcacagggaagtcaggatatgcttccggcggtaggaatgtatctgatgatggcttccgcagctcccggagccatctatatcggaaattatctgctgcatgcaaagacacccggatatcgcacgaaattattcccgtccggaaaaccgggattggtaatcgggctgattctgggatcgttgtttttatttgcagcaggcctgcttgtttttttcatctccgttgtgagaatgttgtgatcatagattgacagagtgtaaaaaagcgtttataattgtaccaacccgataatacaattctataaggagaatgcgtatgagatatgaaattgtaggagagacattaccggcagtgatttgtactttagaagaaggagaaacgatgatcacagagaagggggcaatgagctggatgtccccgaatatgaagatggagacaagtacgaatggcggaatcggcaaagcatttggaaggatgttctccggagagtcgatcttccagaacacatacacggcaaagggcggacatgggatgatcgcatttgcatccagttttccgggaaagatcattgcacatgagatcgcaccgggaagagagatcgttgtacagaaatccggatttcttgcggcagaagcgggagtcgatctgtcgatcttttttcagaagcgaattggttccgggatctttggcggagagggatttatcatgcagaaactttccggacggggtatggcatttctggagtttgacggtcatgtcgtagagtatgagctgaagccggggcagcagattgtggtagataccggttatctggcagcgatggatgcaagctgcagcatggagattcagagcgtgccgggtgtgaagaatatgctgtttgggggcgaaggtgtgttcaatactgttgtgagtggaccgggacatatctggctgcagacaatgccgatttccaatgtggcaggtgtgatcgccccatttttgccgacaacgaaataaagcaattcctttctctatattgacgtaatttgtgaatgcgtatataatccatattgcaaatatattcggaggatatgcgatgcaatcacaatcagtaaaagaaacagtaaacggatttcaggtatcagaaagtgatggaatggtatccctctctgatttgtgtgaggaactatctatttctattgcaaccgggcgaaactgggtcaggttggggaaaatagtgccgacaatgaaaaaaaggcgtacttcctatttttcccaggagtatgtttccagaataaaatctgagattcaaagtggaaagaatccggcattaaagagtcgcagaaacaaaaagtttgtttccggtcataacatttataattcttatgtttctgattcttcagtcaatgttgctgttgttcaagctgtaattgatacattgaaaagcaatgcaattgaagttacagaggatattatgttggggctgcttacggattgtgccatgcagttgattactacaaggacggtttctttggacgagaaaggaaccgtttttgattttttgagtggaaaatatagagagaatccgtatgtctttctggtagaaaatctggttgttgcaaaagacaggataaaggatgtcatcgaggaatatccagaactctttcgatatacttaccagtatgaagatggagaggatatccttgggttattgtatatttccctcaaaaatctgggaagcaggaaagcaaccggctcttattatacaccgacagttttggtaaacaaactttgcagtaagctgttttcgatgaatgaatgtaaaaatcggacggttttagacccttgttgtggaaccgggaattttattcttcagcttccgcaggggattgattacagggatgtatatggaaatgatatggatgctgtcagtgtaaaaatagccaggatcaattatgcattaaagtattgcatcagtgacaggaaaataattgagcatcatatcaccaggagagattatcttacttttacagatgagaagaaatatgattttatcattggaaatcctccctggggatatacattcccggaatctgaaaaagagcaattaaggaaacggtatagatcggcagcaggaacaacgatagagtcttatgatatgttttgtgaacaggcactttgtcagctgaaagaaggcggggtattatcgtttattgtgccagaggcaatcctgaacgtaaaagcacatacgaaaatacgagagatcatgacaaagaacagttcgtttcagtatatagaggttttgggaaatgcatttgataaggtgcaatgtccttgtgtgattcttcagatactgtatacgagagagcccatatccactgttggaatggtagtgaatgatggaaagcgggagtttaccatacagacgaaaagatctgtgaatgccagctgtttttcctttatgatttcagatgaagaatatgcaattttaaacaagctggatatgttagaagggaaagcaacgcttgccggccatgcagattttgcgttgggaatcgtgacgggaaataataaaaaatatatttcacaagagaaatgcccgaacaatgaaatggtccttaagggaacagatatttacaaatacaaatttcgcaaaacagaaaattatcttgtattccaaccgcaattatttcagcaggttgcgcctgctgtgtattatcgtgcgaaagagaaactgttgtatcggttcatctgcgatcagcttgtttttgcttatgatgaccggcaaacgttgtcattaaatagctgtaatattgtgattccccatattgaaggtctgtccataaaatatattatggcaattttaaattcaagagttgcccaattttattttaaaaagaagtttaattctgtgaaggtgcttcgttcgcatattgaacaaataccaattccttttgtaaataaaaggaaacagaatcaaatgctagcatatattgaccagatgcttgcatcttcgcaagatgagagagggaaaatatatgataaaatggatcgggaaatatcgaaattgtataatcttactgcagaagagtattcttatgtgtattcaagtgtggatgaagaaaaatatctcctgagttagctgctcaggagatatttttaccttttgacaggaccatatttaagatatcactttcttctgtaaaaaatggtttcagttcttgctcagtcataaatacctgtccttcaaacacctcttttttcttttttcctgtattttcgtttctatgctgaggtcctagttttccagtttcttgaagttctttacttgtgagaacccagtataataatttatctctgcagactccgatccatataaagatatcacagcaggaaggcttcagctgttgaaagtgatatttaaaattgtgtttccgggcttcctcataggagtatgcgcggtttgaaagacttccttttgtcttgacactgttggctctgcatgctttcacttcaatgcggattcccggataccacaaatcaaattcaccgtcaaaatcaggatattcggaggaaagagagtttttagctgctttgagaagctggggaaaaagtttatgtatgtgcttttctccccaggtctgtccaaaggtacgtggagccatttcaaacaggtcaagataccgattctgttcttgatatcgttttgcaaattcatggcttagattttcataatcttgaaaagtcatagcgccaatggaaagtaaataagccataagtttgttttcagtggtaaatggagcaatcgcgtcttccctttttagtgctgcaatgatggatttgttactatttgaattttcaatgaagtattctaatttatcacataattctttcatttagttttcctttcaatgacagtatattctttggacccaatacttctatacttctgtccagaatgcctttcatacatgcaatggcaattccataatttgtgatgggaacgccttgttctctggcacaattcagccgatactgcatctctttttcggtcagtgtacatccgccgcagtggatgatcacctgataaggagagagatctgttggaaaatcacttccacttgtgaatgtaaactgcagatgatctgacgatgtaaattgtttcagcatacggggcagttttacagttccgatatcttcgcactgtctgtggtgtgtacaaccttcgcagatcagcacatgatccccgtcttttaatgtctgaagtgtctttgcacctttgacaacaagctcaagatttcctttatatctcgcaaacagaatggaaaaggaggtcagtggtatatctgttggtacgattttgttcacagtatcaaaaacctgactgtctgtgatcacaagagcaggaggtttgccaagagtgtctaaaactgtagaaagttccgtctctttggttatgaccgggatggctccgtgatcaaggaggtcccggatcgtctgctgctgtggcaggatgagacgccctttcggagcggatttgtcaatggggacaacaagcaccacaaaatctccgtgggagatcagatcgcctgcgatggtttgtttcttttgcttttgcggaagctgtttggagagcagctcttttaacttctgaatgtttgtgccgtctgcggcgctcacagacagacattgttccgggagtacgtcatccggaagagaaggaatgtcaaaagaaagatccattttatttacaacaaggataaagggaatctgtcttttgcggatttcctgcaaaatttgtatatcctcttcgctcattccaagctgcccgtcgatgacaagcagggcaaggtctgttgtatttaaaatgtgttgtgttttttctatacgaagagaacccagttctccggaatcatccagtcccggtgtgtctgtcaggacaaccggaccaagaggcagaagttccattgcttttttgacagggtctgtagtagttcctttttggtcggaaacaatggaaaccggctgtccggcaatggcgttgatcaggctggattttcctgcatttctttttccgaaaattccgatgtggatgcgttcggcagaaggtgtctggttgagtgtcataggaagctcctttctcttaaaaacggaaatcccggcgattgttttgctcgatcagccgaagattttcctgtacgacggctcttgctttttcatttgggacatggaatacttcttttgcgatcagccggtctccgattgcttttgtttcaggagaggcgtaatccatgagatattctttgagtgtcatcagggcatttgggtgacagcagttctgaatctgtccgcttttgcaaagcgacataaagcgatctccggtacggccttcccggtagcaggcagtacaaaaacttggaatgtaatccatttccatcagccagcgcacgatctcatccaatgttcgggtgtcgctgacatcaaactgttctgattttgcatcatccggctccggttcacagtaaccgccaacgctggttcgggaaccgccgctgatctgggaaactccgaggtgcaggacacgttctctgcatttctggctttctcgtgtggaaatgatcatgccggtatatggaacggcaattcggatacaggccacaatctttgcaaaggtatcatcgtcaatgccgttatcaaatgcatccgcattgatgtcatcggcatgacggagtcttggaacactgatcgtgtgaggcccaacgccaaaagcggcttccagatgttctgcatgcataagaagacctgcaaattcatagcggtatttatccagtccgaacaaaacgccgattccgacatcatcgatgccgccttccatggcacgatccatggcttcggtgtgataattatagtcatgttttggtccggtcgggtggagcgtcaggtaactttctttatgataagtttcctgaaagagaatataggttccgatgccggcttctttgagcagacgatagttatccacggtggtagccgcaatattgatattcacccggcgaatggcaccgtttttatgtttgatactgtaaattgtctgaatactctccagatagtagtccatcgtgttgcggaccggatcttctccggcttccagagcaagccgcttgtgacccatatcctgcagagcgatcacttcttttcgaatctcatcctgtgtcagctgctttcttgtaatatgtttgtttttcaggtggtacggacaataggtacagccgtttacgcaatagttggacagatagagtggtgcaaacatgacgatccggtttccatagaaatcttttttgatctgttctgccagtttgtaaatttcctgatttttttcttcgatcggacaggcaagaagtacagaggcttctctgtgagaaagcccttttcttaagcgtgctttttccaggattgagtcaatgagagcttcgtttgtcttgtttgcatcggcgtaagcaagggtgtctaaaatctcttcgtggctgataaaatcatctgcatgttttgaatatacatcatacataagtcattcctccaattcgtaaaataaaaatgaaaatcacagtgattcaggattcctgtttaaggaatctccccgggcagttaccacctgatagccgatggactgcattcgttgttccagttccatccggcattctgcagcttcggcatcggtgctgatcttgttgtcatacaaaagataatcttttcgtacctgttttggagaaaggttcggcatgactacattggcaccggataaaataccgagttctcttccgttcggggcaatggttccgagagcggttgttgccggaagaagtactttaggaagcatcaggcggatcagtcccagaagaaacaaggtcagttccagtgttccagaaggctgtccggcaaacggtgtgtcatgatgagggataaaaggaccaatcccaaccatttgaggattgagctctttgaggaacaaaagatcctctgccagatgttctgttgtctgatatggagagccgaccataaatccggttcccacctgatatccgatctcttttaaatcccagagacactgctgtctgttggcagccagcagatgtgggggatgaagcttctggtagtgagcggtattgtgtgtctcatggcgcaggagaaaacgatcagctccggcatcaaaaagctgctggtattcttcttttgtggcttctccggtagaaagggtgatggcacaatccggataagcagtccggatggcataaaccaggtcgctgagccggtcagtcgtataataaggatcttccccgccctgaaggacaaatgtacgaaatccaagggcatatccggcctcacagcaggagagaatctcttgtggagtcagccgataacggtgagcatgggggtttccgcttcggattccgcagtaataacagttatttttgcaataatttgtgaattcaatgagaccacggatatacacatcatatccgtagaactggatgcgtacccgacgggatttttcaaagagatattctgcaagctgaggggtgcgtccgtccagcagctgtttccattcagaagtacggagagtatgttcttcctccagtttgtcgatatagaaccttagatccattccggggtctcctttctgtgaaaaaattctgtattttttcattatagcacagttttgaaaagtgagggttattgtttctggatggaaatattgacagagcacaggcggtgtgataagttggacacagaaatatcagaaagtggtgatagaatgtccgaagtaagaaaacattttgtttttcatggcaaagttcagggtgtgggatttcgctataccgccaagtatcttgcgttatcactggaactgaccgggtgggcaagaaatgagtgggacggcactgtgacaatggaagttcaggggcgggagacacggatcaataaacttctggtgggattgaatcaaaatcagtttatttccattgaatggatcgatacaacagagattccactggaagaagagaagacatttaccgtaaaatgaagagaagaagagcttggatgatagtatagaatgaacaggaggagcattatgaaattaggatttatcggaacaggaaatatggcaggtgcgattatggggggcatcatcaaaaatggagtattaaaaccggaagagatcataggttcagacatattagatgcaggaagagaaaaagtgagatccctttatggcatctgtgtgacggatgacaacagagaagcggcaaaggcagatatcgttgtcctttctgtaaaaccacagtattatccgcagacaatagcgcagatcagggatgtgatcacagacagtcaggtaatcgtaacacttgctcccggaaagacgctggaatggctgcagacacagtttggcaaagaagtaaagatcgttcgtacgatgccaaatacgccggctatggtcggagcaggcatgacggcagcatgtgccaatgcatttgttacggaagcagaaatggaaaaagtgctggcgatcttacgttcttttggagaagtagaagtggtaccggaacatctgatcgatgcagtggtatcaacaagtggaagctcaccggcttatgtatttttgatgatcgaagctatggcagatgcagcagtggcggagggcatgccaagagcacaggcttataaatttgcagcacaggcagtgatgggaagtgcaaaaatggttctggagacggggaaacatccgggagaactcaaagatatggtatgctctcctgcgggaacgacaattgaggcagtacaggtattggaagagagaggatttcgaagtgctgttatggaggcaatgcgtgtgtgcgcggaaaaatccagaaatatgtagattggcagcacaagaggggggacggaaatggaaattcatggaattcagaaaatgacattgttggactatccggaaaaagtagcatgtacgatttttacagccaggtgcaattttcgttgtccgttctgtcataatgcatctttggtcacgcatgtagatagggaagaagcaatatccgaggaggaaattttttcatttttaagaaagaggcaggagattttagacggtgtgtgtatcaccggaggagaaccgctgcttcagccggatgtggaagagtttatccgaaaaataaaagaattgggatatctggtcaaactggataccaatggcagcaatgtgctcaagttaaagcgtctggtggaagaaggactggtggattatgtagcgatggacattaaaaatgctccggataagtatggcatgacgattggaatcgaagagtatgatatgtcgaatatttttcagagtgtagattttctgatgtccggggaagttccatatgaatttcgcacgacggtcgtgcgtcagtttcacaaacgtgaggattttgctgcaattggtcgatggatcaaaggggcaaagaaatattatctgcagagttttgtagattccggagatctgatttgtccgggaatgaaggggtatacaaaagagattatggaacaggcgctggaaattgtgaagaggaatattccaaatgcgaagttaaggggtgtgtgaaaagatcactcagggattagctcgataggaaaaacagagaataaacaggtgtaatgtaaggaggatgtgttcaaaatgatacacatcctccttgtattgtgtagaataaaaatatcatgtcaggacgtacagggggattctatatgggaaggacaataaaaaatgataccttttggatgagggggataaaaaatgaagaaagatgataattcaggttgtttgaattgttactttactataataaaatattaatcagaaacagagagaaaacaagggaggcaggaaaatgagaagaaaagtaaaaaaaattctttcggtaacattagtagcgatgatggttacagggcttgtagccggatgctcaggcggttcggataagaagagcagttccggaggagacgagcaggttactttgcgtttcagttggtggggcggagacgagcgaaatgaagcaactttaaaagtaatcgaagcatatgaaaaagaacatccgaatgttacgattgaagcagagtacagtggcgacgatggatatcaggaaaaattatctacggcacttgcaggagaaacagcggcggatattattcagatgggacccggatggatgccaagttatgtaaaacaaggcgatttctttattgattttaatgagtatacagataagatggatttatctggtttttcagaagaattactgaaaaaaggaatttacaatgaggatgaacttcttgggattccgacgggtgttgctactttggcactggtagtgaacaaaacactggcagatgagatcggattggattttacagatgtaacctgggaaaagcttcttgaaatgggaaaacaggtacaggagtataacagtgactgctatttcctgaatgtagacacagcatatttgttaacacatgtattccgtccatatgctatgcaacttacaggaaaatctttcatcaatgatgaagaactgaaaattaatctgacagacaaacagattacagaaattttacagtatatcagtaatctgtattctacaaagactgttcaggcagcaggcgagacagcaacatttgaaggcgctccacagacaaattcaaaatgggtaaatggagaaatcgtatgtgcacttacgaactcttcacagataaataactttgccagcgcaaatgaaagtgcggaatatacagttgttaatatgccggttcaggcagactcatctaaacagttgaatgatggctatagtcttgatccgccgcagttgatgtgtgtaaataaaagcagtgaacatgttgaagaggcagtggactttttaaattatttctttaacaatgaagaagcagcggtaacactgaaagatcttcgttctgtaccacctacagaaaatgcgcggaaaatctgcgaagaacagagcctgattgatgaacttgtaattacctcggtagagcttatgtcagacaaaaatggtgtgaatgagctgggacttacaacagatgcagaagttgaggcagtatttaagacaatgattgaaagtgtaatctatggtgagagtacaccagaggaagcttgtgccaatggagtagcatctatcaacagtattcttgaaagcaagtaatgtaaaaagctgttataaaatgaggcaaattggctgatgttttgtaacagcttttttaatggatatattagaggagatttccggttatgaaaatacgaaatcaggaaaacggcaggcaagttcctgcaaaaacaaaaaaatataaaaaaagagattatatgggactgatatatattgccccttggttagtaggtttgttagtattgcagatttatccatttgtaacttcattttactattcatttacagattaccggttttttaacagccctgaatttatagggttgggaaactatatcaagctgtttaccaaagatccggaatttttcaaatcattgcaggttacgattatatatacgctttttacagtgccgggaaaaattattatggcgctgtttattgcactgcttcttaataaaaacatgaaggggatcggactgataagaacaatatattatattccgtcattgttcagtggaagtgttgcagtagcaattctctggaaacttttattcatgagtgacggggcaattaacagtatactgaatacgctgggacttccaacagtgcaatggctcggaacagaatcaacggcaatggtgacgatttgtctgttggaaatctggatgtttgggtcatctatggttatgtttttggcagccttgaaacaggttccggcagatttatatgaatccgcatctttggatggagcgggaaaggttaaaagctttttctatattacgctgccacagatatcaccgattttattttttaatgtaatcatgcagacgattacggcattgcagaactttacatccgcatttgttgtgacaaatggagggcctaataatggaacctatgtactgggaatgaaactttataatgaagcatttaaatattttaaaatgggatatgcaagtgcggtatcatgggttatttttgcgatgatcctggttgtgacattacttcttttccgtttttcatctggaagagtatattatgaagatggcggcgatttttaaggagagcaggaatatgaagaagaaaaagattaataaggttattatatatattttaattgtacttgtaggaattataatggtttatccgttgctttggatgatcatggcatcatttaaaacaaatagtgaaatattcggttccgtgaaacttttgccaaaatctttcagtctggattcatttattgaaggttggaagggaacagggcagtatacatatggcacatattttttgaatacgattattctcgttgttcctactacgttattcacggtattatcatctgcaattgttgcatatggattttccagattccgttttccgggcaaaaaaattcttctcggtgttttaattgcgactctgatgcttccaagcactgtagttatcattccgagatatacgttgtataacagcctgggatggttagacacatatttgccgttttatgtgccggcattgctggcatgtaatgcgtttttcgtatatatgttgattcagtttattcgcggaatccccagagaattggatgaggctgcgtatattgatggctgcggaagttttaaaacattttcaacgattcttctgccgttgatgaaaccggctcttttttcagcaggattattccagtttttgtggacatataacgatttctttaattcgctgatttacatcaacagtgtaaataaatatcctatttcactcgcactgcgcacggcgattgacgcagatgccaacattcagtggaacgagattatggcaatgtctgtggtatctgtattgccgttaattgtactttactttatgggacagaagtattttgttcagggaatcgcaacaagtggattgaaaggctaagaaaagagaggagaccatcacgagatttggattaatgggaccagggaaaatagcaagaaaatttgcggatgcatgcggtaaagtggatggggtagagctggttgcagtagcatccacaaatgagaaacgggcaagaatgtttgcggacgaatttggtattgaaagaatctgttcttatgaggaaatactgaagcgggaggatattgatgcaatttatatagcggtcataaattcattgcattatgatctggtgaaaaaatgtctggaagcagggaaggcgattttgtgtgaaaaacctttttgcgtgacggaagagcaggcgagagaattagttcagttagcggaagaaaaacacattttattgatggaggcaatctggatattaagcctgccttgtattaagcgtatgaaaaaatggatagaagatggtgcaataggcaagttaaaatttgtgagatcaagctttgcatttcaggcagaatatgacaaagataacagatttttttcgcgtcagcttggcgggggcggattatatgacgtagggatttatgtactttccctgattcttttcgtaacgggtgaatttccggtcagagtaaatgcagaacagtattttggcgagaccggagtagatgaagtaggaacggctgtttttggatttgatggagaatatattgcgcaggcagcctatggaatcaatgcaagtgcgggatatgccacctgtatttatggaacagagggcgtgatcgaacttccatgtatctggaaaggaaaagaagtgttcctgaaagatatcaatggaacagtcatagaaaaaatagaagattcaaatgagaatggttttatctatgagatcaaagcatttgcacaggcatatgaaaatggagagaaagaagtgaaggatgtgccacatagtctgacattggcatgtgcaaaattgacagacacaatcagaacacaaacaaagtaacttggaaaaatatgttgaaatgtatgatggatgggagcgaagaagatggaaaaatatcttgatgcaggtttatcaccaaaagaaagagctgaagatcttctgtctaaaatgagtctggaagaaaaaatgggacaggtgaattgtttgtttccatttaaaggaaattgggaagaactggaaggggaaatgacttatggaataggagaagtcagtaccttagacgtacgtgaaataaaaagtctggaaaaggtaatccaatggcagagaaaaattcaggaaaaagtgatggcaaatagtgaacatcatattcctgcaagttttcatatggaaggtttatgcggtccgtttattcaagattccacgagttttccggcgggaattgcaagaggcgcatcttggaatccagaattagaagaaaagattggaaagtgtgtaagcagacaggaactggcatgtggatttacgagagtgcttgccccgctgcttgatatttcaagggattccagaatgggacgtcagggagagacatatggggaagatccgactcttacggcaatgctcggaacagcgtatacgaaaggtgttcaggagaatgaagtcgcaggaagacatgccgagtcaacggcaaaacattttttgggatttcataattcccaagggggaattcacggtgcgaatagtgatacgccagaacgccttttagatgaagtatatgggaaaccgtttcaagcagcaattacggaagcaaagcttcggggaatcatgccctgttattgcgcaatcaatggagaaccggcatcctcttccaaaaaacttttgacagaccttttgcgaaaagaaatgggattcgagggggtatgcgttgccgattacagtgcagtaaggaatgtgcatacaatacaggatgtgggagaatctgtaacagaggccggtcttatgtgtatggaagccggaatggacgtagagttacagaaccggattgcatttaatgatgagttaaaagagtggtttcgtaccgggaaggcagatatttctatcttgaatcaggcggttttacgtgtcctggaagcaaaattcaggatgggtctgtttgagcatccttttggcttggaaggtgaaaagttaaaatccgtattttataataaagaggacagaaacgtatcgttacaatcggctttggaatccatggtacttttaaaaaataatggagttcttccacttgacagatctataaaagagggaaaaataaagaaaattgctgttattggcgcacaggcgaaaaatgcgaggatttttttcgggggttatacgcatttaagtatggcagaagcagttttggcaaaagcaaattcaatcgcaggattagaggcaggaagtatcgcgaataaagaagtgacactgataccggggacacagattcaaagtgatgaaacagaggagtttgatgtgatcttacggcttcagaaaccagggtgtagaagtttactggaagaattgcgtgcagaactgccagaagtagaaattctgtattcttatggatatccgatagccggaaacgattgttctcatatagcagaggcgcttgaaacagtcaagaatgcagacgcagttgttttgacattaggaggaaagcatggttcctgttcgattgcatctatgggagaaggggtagacagtacagatattaatcttcctgtatgccaggatgaatttatccgttgtgcagccgaacttggcaaaccgctgataggggtacattttgatggaagaccgatatccagtgatattgctgaacaatatctggatgcaatcctggaggcatggagtccggcagaaacgggcgcagaagctgtagtgaaagtattgacaggtgcttataatccgggtggtaaattgccggtatgcgtagcaagaagcgcaggtcagattccgatatattataaccatatcaacggatctgcatggcatcagggaaatagcatcggatttaaaaattatgtaaatatgtctcacgaaccacggtatttctttgggtatggactttcgtatacaacattttcctattcaaacctgaagttagatacaaaggaaataaatccggatgaaagtgtgaaagttcaggttacaataaaaaatacaggaaatcaagacggggaggaagtcgttcaattatatattcatgacaaaaaagcttcggttgtcagaccgataaaagagcttgcagggtttatccgtctgccgctaaaagccggtcaggaaaaaagcgtagaatttactttgaaggccagccagatggcatttttagatcgggaaatgaagtggaaaatagaaaaaggagaagtggaaattcaggtgggtagttcttcggaagatatttatttgttagatgttgttcggattacagataatgcatggattgaaggacgtaaaagggctttttatgcagaggtaaggagtatgtaatttacaaacaacagagcgaacggcagaaaggaaattgcgaagatgagagtagagaaaaatacagacaaggtgttacagaaagaacagggtttctataaaaatccaattatccatgcggattatagcgatccggatgtaataagagatggaaatgaattttatatggtggcatccagttttacgtatctgcccggtgttccattacttcattcccgagatctggtgcattgggaattgatcaattattgtatgaaacatctgcccttgaaacggtatgaccagccggcacacggatgtggatgctgggcaccgtcaatccgaaagcatgatggaaaattttatgtttttgtgccgttgccggatgaggggatttttgttgcaacagctacagatccgtatgggaaatgggagcttcattgtttacacactgcgtgcggatggattgatccatgtccgctttgggatgacgatggaaaaacatatatggcttttgcatatgcaaaaagccgatgtgggatcaaacaccgtatcagtatttgtgaaatatctcaggatgcatcccgaattttatcagatcccgttatggtatatgatggaagccttcagaatccgacgatagaaggtcctaagttgtataaaagaaatggatactattatatttttgctccggcgggaggtgtgcagcagggttggcagacggtactgcgttccagaaatatttacggtccatatgaatcgagaattgtcatgcatcaggggaatacagaaattaatggaccacatcagggtggttttgtagagctaaacgaatctcagggagtttttctccattttcaagatcggggagcttatggaaggattttgcatcttcagcctcttgtatgggaaaacgattggccctttatcggactggaacaaaatggtgatgggatcggtgaaccggtggaaacatggtcaaatccattaccgaaatgtaaagaaaagatgcagattttgacggatgatgaatttgaagaaaaaaaactgggtcttcaatggcagtggcaggcaaatccacggagtgaatggtatagtctgacagaaaaagaaagttgtttgcgattatatgtaaaagataatccggctcgtaaaaaaaatcttttgtggtacgcaccgaatgcacttacacaaattccgcaggcggaaagctttgacgcaacagtccgactggaattacagggaaaagaagatggagaccagattgtgtttggaatgttgggacataaatatacatatttggcattgcaaaaagcaggtgaagaatattttgttgtattaaatgaaggaaatgtaacagaaattacgggaaaaggaaaagcagaagagaaggtattaatgaaacttccttggaaatgcaacactttatggattcgtatcaaaatgcagaagaatgcggtatatacatatgaatattccgaagatggaaagaattatactgtactgggagaccagagaatatttgaagcgcaggcgtgtacatggacagggatgaagctggttctggcagcacaaaatgcagaaaataaaaaaagtacaggttgggcggatattgattttatacattttgaataattgtattttgcaggtggagaaggaggaaaatggaatgggtgtgagtaatcaggatggagacggtattttaaataaccagaaattgtggtataaacagcctgcagaaagatgggaagatgcccttccgatagggacaggacggctgggagcaatgatttatggttatccagatcatgagcttatgcagttgaatgaagacagtatctggtatgggggtccgatcaacaggatcaatccagatgccggaaaacatatgaaagaagtacaaaatctgattctggacgggcatatttcggaagcagaagaaattttaaaatataatttttgcgctacgccgcgaagtatgagagtttatcagcctttagggtggctgcatatagatatgaggacagaaggtgttttttttcctgatcggtttaaagcagatacgtatagtaaaatgctggattttccacgcaaagaagaggcgccggtatcagaatgtacaagagcgcttttgctggagcaggcgattcatcaagtgtcatttgtacaaaatgggatccgctatcagagagaatcttttgcttcctatccggcgcaggtgattgcagtgaacttgacgtctgagaaaaaaggaaagctttctttttcctgtttgcttgagagaggccgctttttggagtggtctggaaaaaccggagaaaatacagtgatgatccgtggaagccagggagaaggcggtgtccgttattgcggagctatcagcgtaacggctgcgggcggaaatgtacgggtggcaggagagcatattttggtgaataatgcggatgaagcaacgatttatattgcggcaggaacaacctattatcatggagaaaattatattgaaaagacattagaacagcttgaagcagcaaaagaaaaaggatatcaggcgcttcgtgcagaacatatcaaagattataaaaatctgtatgacagagtgtctgttcatatctcttcaggggaaaatacagaacctacggatgttcggctggaaaaagtaaagagagcagaacgcgataatggattagtagagctttattttaattttgcacgatatctgctcatttcttcgagtcgtcccggcagtttaccggcgaatctgcagggaatatggaatgataaaatggaacccaaatgggattctaaatatacaatcaatataaacgcacagatgaactattggatggcagaagcttgtgggctttccgaatgtcatttaccgctttttgatttaattaggatcatgcagaagagtgggcatgaagtcgcagataaaatgtatggatgcagagggtttgtcgcacaccacaatacagatctttggggagactgtgcaccgcaggattcttggccatcagctacgtattgggtaatggggggagcttggctatgcctgcatatatggaagcattatgaatatacattagactgtgcctggcttgcttcggtgtatgacctcgtaaaagaagccgttttgttttttgaagattttgtaatagaaaaagatggagaggttttgatttgtccatctacatcgcctgaaaatacatatctgatgaaagactggacagaagggcgcgtaacagcaagttctacgatggataatgagattttaagggagttattgggtgattatctgaaaatgtcagaaatattaggcatacaagatgaggttacacaaaaagcagagaaaatccttccgaagctcaggaagcttcagattggcaaacatggacagattatggagtggagagaggattacgaagaaatcgaacctggacaccgacatatttctcaactgtatgcgctgtatccgggacatgagatttcggtagaaaagacacccgagctggctaaagcggcggaggttacactttcccggagattaaataacggcggtggacatacgggatggagctgtgcatggatcattgcttattatgcaagacttcacaaaggaaataaagcaatggattacttacgacatttgcttcagcattccgtatgcatcagtcttttagatacgcatccactgaatccttccggtgtaattttccagattgatggaaatttgggagctacggcagcaattgtagaaatgcttgtacagacagaaggagaagagatttatttgcttccggcattgcctgatgaatgggaacagggagaaataaaaggaatctgccttccaggcggtcttacaatttccttggtttgggaaaagaaaaagcctgtttttgtaacgttacaggctaaagaaaatacgaaaagatgtattaagtttggaaaacagataagaaccgtgaacattgcagcgggagagagtataaaaatagaattataactatttcagcttcatggaagctaggggaatgtggaacgagataacggttcccattccctttttacttagaatgtggagggtactttcagccccatatttgagtaccagtcttcgattgatatttggcagcccgatatttttgctgttttcatcttgaatccgttttttaagcgccagagtttcttctttggacattccgataccattgtctactactgtaaagtggatgaaatcatttcttgaatagatgcgaaccttaataaatccggtggaatctaatgtggcaactccatggctgatactgttttctacaagtggttgaagcataagccggagaacgtataagtcctgtaaatcttcatcaatttcatagtatacaatgaatttatctccaagacgctgatgttgaatatctacatatttttttaaataatcgatttctgtgttcagtgtcacaacggtgagaggatccataagagaatatttcaaaatatctgaaagattctggatcatcatgtttatcgtaccagactgtccctgtatgcgtaatgcttcaaagtcgatcgcctgaagggtattaaataaaaaatgtggattgatctgatactgcagtgcggccatttctgcaagctcctgtttatattgtttttcgtgaagctgcagttttaaatagctggaatttaaaaatacattgattacattatttaatatgatatcatattcatcattgatggtctgctttggggttgtggaagacaaaatccctttttcagcctgattaaaagtattgataatatgcgaaatctgctggaagttgcgttgagtaaccacatatgccaaaaccacagatatgacacagttagataaaacaacaccaagaagaagcaggaatgtggacatataatcagtaaatatactctgggtaggcagcagagaaagaagggtaaagccgtaatccgaattatagagtgtttgcgatagatagtttcgttgatcaaaagtaatccggtgcgcttttgtactgtcggtttcatgaatcagtttttggatgtgctgttctgaaaatagtcccttatatccgtgagttccgcataaaatgttaccatcattgtcgagcagcaaaatataattgtcgctggtgcgtgatgtctctagagcagaagttaatttctctatatcaagattgatgacgatcactccttgggtattggacatggaacgatataaggtaaggtattgaacaggggcatcaaaagaatatttctgaaattctctgggttcaatatggatcccctgtatgttttgctttttatagtgctgataccattcggcgtccttggcggttgtaagagaaagtaatccgccttttgaagaaaggaaagaatcgtatccgtcaagatagagataaatagaatctacatagttgtcgcctgcacttgcagaggcacttaaaagactctgcagggtattgagaaaaacaatatctgtgtaggaaagcgtttcttctgacagcagttttcgtaaagaaaaaaccagactgggattataggtcagaagatcatactggtaggcggatgcactcatgatcccatttaagttttcatttagaagctccagtgagtttgaagttttccgaatggaagattttgtgttttcggaatacatataaactcctacaattatagccattgcaagaattggaaccagcatgatcataaaaaattgtttccatcgtgtgaagaaaaaacgccgcatcatttgttatcaatcctttcattttggctgcgaaattctttgggtgaaacagaataatattgcttaaaagctctggaaaaatttttgggattgtcatatccgacctgatacgcaatctcatatgctttataggaaatgtcgcacaaaagttcagcagcttttttcattcggatttgtgtaagcagttcggaaaagccggattcagatttctcacgaaaaattctggacaggtagttagggcttaaatttacccgggcagccgcttcgctaagagtagcgttacggtaattttcttcgaggtaatgaaccacttctacaatgatttttctataatagttggaatctgcttcattgcggcaaggacggatatgatattttttgtccagtttttgccggactttttgaaggcctgtatacagctcgtcatgtttgatcggtttaagcagatagtcagcagcatggtgacggatggcggcctgcatgtaatgaaaatcggaatatcctgttaagaagattacaagaatgtcaggatatttttcatcaatatgctggtttaattcaataccattcatgatgggcatacagatatcagtcagtacaacatcgactttgtttttttcaagatagtcgagagcctgctgtccgtttgcgaaaattcctttgacttcataaccataatttgcccagggaaaaagattttgtagtccctggcgtattttcaattcatcatccacaatgattaaagaatatttgatagtttcgttcgatgtcataacctgtacctcacaatatgaaaaatgtcataagaaaaaatagacatttttattgataattccacaacttttttataatattatacaaaatttattgtttataatcaacttttgtgaggaaagagacaggggtgtttcatgagctattcataaatatatttaacctcaattattcacgacacagttgtgaaagtagctgaaatccacatagttactgcatttaagctatttattgcatttcatctataaagtgaataaaaaaagagcatccagttgtagtaaaattaaggtattcaacgtcttaataatcacacaaaggagctctttatggatattttaaacacctttacactcaaaagcaatagacagattaaaataaagtttgacggaggtgatttatcctccgatgcaggactccttctgataaaagaattcgctgcaaaaattggttttacacagctgatcaaaaagaactttaaaaccaatggatatggaaccctatcagatcattcagttttactgtggtcgtggcaaaatggaaaacttcatcaaagggaaaagcaggtttgaatttgctgctgtcagcagtcattccaaagtggtaaatgctaaccgcatgaggattcatatgcttgtctacaacttatttaattggttcagacgactggcacttcctgcaaatatgcgaaagcagcaggttgataccatacgtttaaagctgatgaagattgctgcaagagcagtccgctcagcgagatatatcacattcaaactgtgcagcagctgtccttataaaaaagaattttacaagatattggagaacattcagcaactaactgtacaattggaatagcaactactaacgtaccttgacagttcaaaatgattcacttgaatattacagagatagtttgcccttttttaagagcattggattatttgtcagaagaactggaacaagatttagtgatttagggcatttttatttgctcatgaataattcgagttcatgtataaaagagcaaaatcatgtaataatctgtttgatttttcaaaacgatagcttttgtctgtcgtatctcttatgatttataaggtgagaggatatgtattttttagaatgggaagtgagaaagtgaaaaaagacagattattttcagtgaagaagacgatttctattgcttttgcgtatgtaggaattttgacaggtgcgggcctggcatcgggacgtgaacttgttcagtattttatcagttttggaatagcagggatagccggtgtggtgatcatcgcaggcctgtatatgatctttggaaaaatgattctttcattgggttcttattatcgtgcacaaaatcatagtgatgttttgagtcaggtatcgcatccggtcattagccatatactggattattcgatgatgttatcgtgttttgttttaagctttgttatggtgtcaggtgccggatccagtattggacagcagtttcagattccatcctggattggttcactgttgtgtgcgagcctgatccttgctgtaagctatatggattttgataaagtgatgggggcgcttgggatgtttacgccgatcatcctgatcctgattttaatcggactgactgcaatatttgcaggaccgcagatagactggagcaaaacgatagaaactgcaaggaatatcgattccagtcttcctaatatttatgtatcagttttgaattattttgcattatgtatgatgacaagtacttctatgctgtttgtgttgggcggaagtatcatgggacttggaaatgcagaaaaaggtggaattctgggagggtttctgacggggcttataacaattttgattgcattacttttgtactcaaaagttgatctcatagcagatgcaaatgtgccaatgcagaagctgcttcagaatatacatccggttttaggtctttgtatggccattacaatttttggaatgatttttaatactgggtttagtgtttgttattctttggcaaaaagaattgccggagacaatgaaaccagatttcgaaaaataatgctggtgattgttgggattgcgtttgtacttagctttataggatttaagacacttgttgcggttatgtatccgattctgggttatataggaatcttacttttggtagttttgttgactgcgtggattcgtgaacgaagcaatattcatcaggaacaaaagataaggaaggggatttttaaacttatgatgcgaaaaacagatgaaaacagaaagtttacgcatcaggatgagcaaaagctgaatcagttgatccggaaatcggcggtagatgatgacgagatcaggcatgacatgaaagaaattgtaaaagaaaaacaggattaaaatcaggagggattgagatatgactcaaaaggaaaaagagagctatttacaggcgatgttgtatgtggccagaatcgatggggagaaagatgcagaggaatcagaaagtattcgaaagtttgcctagaaactcaaagtggaaaatgcagatcaaaaaattgatcttaatttatgaactggcattgctggcatgtgtagacggacattactcgtcggaggaaaatgatgcgctgcgcaggatttgtgcaattctatatgttgagtttgaaaagttgcgggaaatactggatcttgtgaaagaatactgcgaattcagaaggcatgcagagtatgttttggaaagaacggttgtattgtatcaggaaaattgaggttgatgttaaggttactgttcccaccagtcaccgcccatacataagcaatctagcacgaagtgcgctgctggagtgcgcaagcacgacgattgcgtatggatgggtggggagttctgtttttataagtcgttataatcgatggttctgttcttaaaatagtattccttatcgtgactgtttatttcccgcagcactttgcaggggtttcctactgctacaacgttagacggcaagtcttttgttacaatacttcctgcaccaaccacaacattatctccaatggaaataccgggaaggatgacagcacctgctccgatccaacaattttttccgatatgtacaggtgcgttgtactgatatcctttttcacggagttctggtaagataggatgtccggcggttgcaataataacattgggaccaaacattgtatagtcaccgacataaatatgggtgtcatctacacaggtaagattaaagtttgcatagatattttttccaaaatgtacatggtgtcctccaaaattagaatgaaacggaggttcaatataacagttttcgcctatttctgcaaacatttctttcagcatggcttcacgcttttttctttcgatcggacgagtcatattaaattcataaagtttatcaaggcattgtgcctgccattccataatttcttcatcaccaggaagataaagatctcctgtgtgcattttgtctttcattttgttcattacgtattctcctaataagattttgatttgttttttatatccgcacgatgaggcgcttcttgtatataactatattgtataatacaattataatgcacacaatacctgaataaaataggcgaaaacgccaatatctagtttttgaaggaaaacctgcatactagatgttggtgttttccattgacattcaaaaatgtgggtgatacactaaatacagcgcttagctgcagaaaggagaggtacgaaacatgtatcaagtcacaaaaagggacggaaaaatagcagaatttaatttgaccaagatcagtgaagcgattcggaaagcgtttgaggccagagaaaaagaatacaatcaggacattattgatctgttggcactgaaggtgactgcagattttgaaccaaagataaagtcacataaaatagcagtagaggatattcaggacagtgtagagtctgtactgatcaaggccggatatgcagatgtggcaaaggggtatattttatatcgaaaacaaagagaaaaaatccggaatctgaactctacacttttggattacaaagaaattgtagacagttatgtaaaggtgacagactggcgcgtcaaggaaaattctaccgtgacgtattctgttgggggtctgatcctgagtaattccggtgcgatcacagccaattactggctctcagagatttatgacgaggagatcggaaaagcgcataagaatgcggatattcacatccacgatctttccatgctgaccggatattgtgccggttggtctttaaaacaactgatacaggaaggtctgggcggtgtgaccggaaggatcacttctgctccggcgaagcatttgagtgttctttgcaatcagatggtgaattttctggggatcatgcagaatgagtgggcgggagcacaggcattctcttcttttgatacctatcttgcaccatttgtaaaagcagaccatctgacatatcgggaagtgaaaaaatgcatcgaatctttcatttttggggtgaacattccatccagatggggaacacaggcgccgttttccaatattaccctggactggacagttccgaatgatctggcaaatctgccggcaatcgtgggcggaaaagaacaggattttacatacggtgactgcaaggaagagatggatatgatcaaccgggcattcattgagacgatgatcgagggagatgctcagggaagaggatttcagtatccgattccgacgtattcgattacaaaagactttgactggtctgatacagagaataaccgtctgttatttgagatgactgcaaaatatggaacaccgtatttttctaattacatcaacagtgatatggaaccaagtgatgtgagaagtatgtgctgtcgtctgcgtctggatctgcgggagctgcgtaagaaatccggtggatttttcggaagcggggaaagtacaggttcggttggtgtggtaacgatcaatatgccgagaattgcatatttatcacaaaatgaggaagaattttacgagagacttgataaaatgatggacattgcagcaagatcgctgcatatcaagcgcgtggtgatttccaaattgctggaagaagggctgtatccgtatacaaagcgttatctcggaagttttgagaatcatttttcaacgatcggactgatcggaatgaatgaagctggtctgaatgcaaggtggattcggaaagatctgacacatccggaaacacagcagtttacaaaagatgtgttaaaccacatgagagagagactgtcagattaccaggaagaatatggggatttgtacaatctggaggcaactccggcagaatctaccacataccgtctggcaaagcacgatgtcgagcagttcccggatatcattacagcagcagaagactgcggaacaccatattatacaaacagttctcatcttccggtcggctatacagaggatgtatttgccgcattggatattcaggatgagctgcagacattgtatacatcaggaacggtattccatacattcctgggagagaagctgccggactggaaatcagcagccgctttggtcagaaaaattgccgagaactacagactgccatattatacaatgtcaccgacgtattcgatctgtaagaatcacggatatctgtccggagagcagtatacctgcccgatctgcggagaggagacagaagtatacagcaggatcacaggatattatcgtccggttaaaaactggaatgacgggaaactacaggaatttaaagagcgaaaagtgtatgatgtagagcattctcatgtgtcaaaagaagcggttcatgagactgcatcggaggaacagcatatatttgaaggcaatggggcagaacatggaaagatacttctttttacaacaaaaacatgtccaaattgtaagttggcaaaagactctctggaaaaggcaaacatttcgtatgaggtagtggatgcaggagaaaatgaagaattggttcaaaaatatggggttatgcaggcgccgacactgatcgtgatcaaagaagaaggtgtacagaagcttgcgaatgcgtctaatatacgggcatttgcagaaaaacaatagaacatagaaaatggaggaactggatatgtatgatattggaattatcggaggggggacagcaggcctgacggctgcgatttatggacagcgtgcgggaaagcgtacgctggtgatcgaaggactgaattttggaggacagatcgtaaattcaccgaaggtggagaattatccgggacttgagagcatcagcggcagccagtattctatgaatttgctcaatcaggcaatgaaactgggggcagagactgtttccgagcaggtaaaaggtgtgcgggaagaggacggcatcaaagtgatcgtgaccgatcagaaagaatacccatgtaagacggtgatcatcgcaacaggagtatctcacagacatctgggaatcccacaggaggaggcgcttgccggttccggagtttcttattgtgcaacctgtgacggtgcatttttccgcgggaaagatgtggctgtgatcggtggaggaaataccgctctgcaggatgcagaattcctctctaattactgtaataaagtatatgtggtacatcgtcgggatgaattccgaggagaaagtaatctggtagatgtgctgaaaggaaaagacaatgttgaatttgtcctggattccattgtgaaagatattgaaggaaaatttatggtcgagagattattcctccgcaataaaaagacaggacaggatttccatattcctgtatcgggagtatttgtagcaatcggacagattccgcagaatgagatttttgatggactggtacggttggatgaaaatgggtttgttctggcgtctgaggattgtatgacatctcatccggggattttcgcagccggagactgcaggacaaaagaagtgcgtcagctgacaactgcagcggcagatggaagtgtggcggcactggcagcatgtaaatatatttctacgaatttttaatatgaaatgaaaaagtgaacgaaaaggacagcctgtcttgtatccatagtagggaaatatggatataaggcaggctgttttgttaaaatatgtcaaattcctgatacttttttcaaaaaattgacatattattgctaaacactcaaagttataatgggaatgttacttgggataattccatgtaaaataacaaagagaggaaggtatcaaaacatgaggaggaaggatctttacagaagaatggcgagaccatttagtgctgtgcttgccggtgtcctggtgacgctgagcgttccgggagtatccgtggaagccgcgccggaaaaagagaggacacgtgtcgaagctgacagtggacaacaattgtatgtgtcacaggatggggatgatgacacggcagacggaacgctggaacatccgtttcgcaccttagaagcagcacgtgataagattcgagagatgaaagcagggggaaaagataccggagggatcacagtaaacataagagaaggagaatatgctcttttaggagcctctttttcgttaaataaagaggattccggaacaaaagaaaatccgatcacatggcgggcttatgaagacgaggaggttaaatttgtaggaaatatccaagtcgaaggaagcaaattttctccagtcgaagagcaaagtgtgaaagaccgtcttccagaaggcgcaaaggatcatgttttagtatatgatcttacaaaagagaacgggctgacggagtttgctccgattccaaagaatggatatggatggccggcacaggcaaatgcaatgtctgttcttgtagatggagatgcgcagacattatccagatttccaaatgaaggattcattgatatttcaagcattcaggaaaaaggatttgtaccgcgtgaccatctggcaaatccggatggaacctgtccggagtgtaccaaagatgcaggtggaagtgaaaggattccctgcaagtatggcgagtcaaagtttttggaacaaaagggtggagtttttaccacaaacaatcaggaagtaattgataaattcccattgtggagtcaggaaacagatatctggacatttggatattttttctgggactgggcagacgataactgtgcaatagaatcgatcgagaagacggacgccggcgttcagatgaccatgagacatccaagccgttatggtgtaggtcagaatggaagaagattttatgcatacaatatgctttgtgaagtagatcagccgggagagtggtatttagatcgagacaatggaaagttgtatctgtatccgaaaaaagatatttcaggaagcagtattgagttatcaatgcagacaaaaccgcttgttacaatggacgatgtggagtatgtaaactggcagggtgtttctttcacaaaatccaatggtaacggaatcgtaatgaaagactgtgagaatgtagagattgcaggatgtgaattcagcgatctggggcagagagcggtatttgtaggagatcctaattatacagacgcagatgtcaatctgggggcttctggaggaagcaacaacaccattcgttcttgtgatattacccggacaggtcagggaggtgtgttcctgggaggaggtaaccgttacaaactgacaccaggaaataataaagtggtaaactgtgacatcagtgatttttctacgatcaaaaggacatattcaccggcggtagaattattcggctgtggaaacagtgcagaacgcaatcacatttacgatgcaccgcatacggcgatccagtttaagggaaatgacatgacgatttatggaaatgacatctataatgtatgttatgaaactgcagatgttggtgcgatctatagtgtcagaagatggagctggcagggaaatgtagtgaagaacaatttcatacatgatctggtcagcacaggcgggatcggttccgcagcagtttatgtggatgatcttggaagtggtgtgactatgacagaaaatctgtttatgaacattccaggatacacgaccttattcggtggtggacgggatcatgtgatcactaataatattcagatcaacagcggaaacggaaaaggtttccagtatgatgaccgaggcctgggatgggcatggtatcatgcagcaggaccggatggagaatgctatggagaactggaggcattgcgtgcaaacccagaatatgacaaagcgctttgggatgaaagatacccaggacttgccaatatcgatctggaatctgtgaaagaacgtacagataaaggagaaggatataaaaactggtatcatgtagctgcccagccggcaaattctgtcattgaaaagaacattctggtaggtgtggcaaatccatatggcaatgtcagcagcaatacaagaaaatacagtaaattcgatgaaaaaacaaatgaatctcacccgcagggaacagatatcggttttgcgaatgcagaagcatacgactttacagttttagaagacagcaaaatcaaagaaatgatgggagatcatcatttccaggtagaaaaaatgggtctgtatgaggatgaattccgtacgttgacaaaaacagagctggcaaaaccggaactgactgcaccgtcagatggtgagcaggatgtcgcagcaacaaatggagtgaaattttcatggaatgcggtagagaatgccggcacatatcatgtagaaattgcaacggatgcagattttaaagaaattgtaaaaagcgaagcaacagatcagacgagtatttctgtaaaaggtctggaaaaatcagcaacatactactggagagtgaccgcaagagaaaagaaagtaaacggtgcattcagtgtcagtgatgtgagaagttttaccacgtcagacaaagaggatggaagtttctttgaaggattccgtgattttgaagagtgggaaggagatcatccatcgaatacgacagaatacgcacattccggacgttatggttttgaactgaatgacagtcaggacagagtcagaaaagaatttggaagcaaccataatgatgtgatgagcgtatggctgtatgataacctgaataaagaaaatggagcagctgctgttgcagatgtgaccagaaaagaagcagacggttctacaccatggatcggaatgggagtatctgtatcaactggtggttcttacaaggatcattatgtagttcgggatggagcgaattggattgaaacagaggtagaaagaaccgaaggctggcatgaattaaaatttgactactcacaaaagggtgtatgtcaggcatttatagacgatgtaaaagtatatgaatttaaagatgcaccatattataattatgtggaaattggagacttctgggatcatagtggttatccgggtgatgtaagtaaaatggtatttgatgatgtgaaagtcggagaacctgacattccggaaaatatcattgatttgaaattcccggaagagagcgtcacagtaaatatgggtgaaaccttacagctgcatccgattgttgaaacagacccggatgtgaatgcagaacttacatatgcttcccaggaatgggaaattgcaaaagtggatgaaacaacaggtctgatccagacggtaagagaaggaagcaccattgtaactgtttcctctaaaaaagatccaatgatcaatgcaacaatcaaggttgaagtaacaaatgctgtggataaatcagagttagacgcgttgtaccatacactgcttaagtatgtaagaacggactatacagaggaaagctggagcgtactggaagaaaaaatgttccaggcatatgcagagcttcagagcaaagactccacaaatgagacagttgccgctgcatggaatggattaagggaagcacaggcagggctgaaactgaattttgaaaaccgtgaaaacgttgtaggagaaaattacggatttgaaaatggaacattagatggattcggacaatatcctgcaaaatctgacgaaggcattgcgatagaagccagtacagaggcacctcatagtggaacattcagtgcaaaagtcacaacagaggatactattcagaaacagccggatggcacaggatatgaccataagggattgatgtatacgattccaaaagagcagttaaaagcaggcgcccagtatgatatttctttccaggtaaaatccggggatgacaaaaatcataagattggaatacgaagtatcttccgcgcagaaaaaaacacaggaaaagatgaaaacaatacttcggaatatgtaaatgtaggacaggaatggacagaggtatcattcagaaccccggcggtaatggaaaactgcaatcgtattgaaattgttatgggaaatgaaaatacaacagagagtgcaggtacttattatattgacgatgtaaaaatcgcagaagcatcggcatatgttgcaacagaaggagttacactcgatccgaaagaggcttctgtgacagtaggagaatcagtggagcttcagatcgtaacagcaccggaaaatgcgacaagtgatcttgcgatctggtcagtttctgatgaaaatattgcagcagtagaacatggtaccgtgacagcaaaaacacctggaacagtaactgtgacagtgaaaacattagatggagaatgccaggatacttgcgaaatcacagtaaaagaagcagaaattccggttgaattagagtcaatcagtgtcacaggaccgacaaagacagaatatgaggttggcgaagatctggatctgacagggctgaaagtgacagcacattacagcgatggaacagaaaaagagctggaagcaggaagctatgaagtgacaggctttgattctgctacagcaggagaaaaaacagttactgtaacatacgaaggaaaaacagcagaatttaaggtaacagtgaaaaaagcggtagataagacattactgaagcaaacctacgattatgcacttacattgagtacagatggcgtgatcgatgatgcgaaaaagttctttgaagaggcaatgacatcggccaaagcagtgttggataacccggttgcatcccaggaagaagtgaatgcggcactggacaatcttctggacggaatctggagattgggcttccatcagggagacaaagagaatctgggtctgctgattgcaaaggcagaaggaatgctggaaaatgcggataagtatgtaccgaaacactggcagaagcttctggatgcactggaaaaagcaaaagaagttatgaatgacggaaatgcaatggaagaagatgtgaagccagcagcaaatgctcttttagatgccattcttgaacaaagatataaagcagataagtctgttttggaaggtttgatccaggaagcagagggaatcgaccggacagaatatacagagaaaagtgtaaaagcgctggataaagcattagaagaagcaagagttgtcatggaggatgaaaatctgagtacagatgatcagaaaaaagtgacaaaagcagaagaaaaactgcagaaagcactggatggtctggaaaaaacatcaggtggcgacaacaataacggcggagacaacaatggtggtgacaacaataacggcggagacaacaatggtggagataacaacagcggaaacaacaatgcggatcagggacagaatggaaattcagagaagccttccaatggaggaaatagtaattctgtgaaaacaggagattctggatctatgctgcttccagtgataggaatcggagtcagcataattgcattgatcggctgcggtattattgtatttagaagaaaacgtcattagaagtgtatcgtaaaaaggggctgtaaaaaaagcctctgattaagaaacgccagaaccggcatttgccggaactggcgtttctttgtatgaatcttcccatttctgctcatacatgcaccttttcgtagaaaaaatggtatacttaataagcctcagccaatcacgcttaaattttaagcaaccttcatttgccgctgctttttgttgtgatatttataaagattgaatccgcatgaaatcagtgtaagttcgagaattacatttttctcgcctctccgaaataatcttttatacgatttatcccactttaacacaccaaaagtaccctcggattgaatacttcgattcattcttaaaagagctccatgtatggacgtaagattgttcagaacttcctgatggatagcggttaactcctggttcattcggatggtccgatttttatgtgccctcgggcagcattcctgcttatgaggacacccttcacaggattcgcattcgtacagttcttccgttcttccatatttattatatttcacaggctgtgttctcttgaagagaaatttctgtccgtttggacatatgagattcccatctgcatcttttgtaaaatttacagcacgatatggattttcacgatattttttgtccgtcgtttcttttttatacatggtaaatttcatatatttttccatgccgtgttcttcacagtaaagataattattgtaagaaccgtatcctgcatcggcaaccggatatttcggataatgaccatatgaacgattgaatttttccaccaaaggcacaaaacattccatgtccgatgcataaggttttacatcgattacggcgatgtactcatcgcagatggctgtctgcaggttatacgctgggagcagttggtcatttcccatgtaatcacgtttcagtcgcataaaagtcgcatcctgatcagtttttgaatagctgttcctttcatctccgcagatttctatatgacgcgcataggtttttaaacgttttagatagccttgcagttcctggtattgtttttgctgaatgctttttctgtgtccgcatccggaaacgaacaaattttcatcaagtccggttcctctcttatacatctccaacaattcagaaacgtaattaatcgcatactcttcacgcttttcaagctttagtcccaggtatccaagtacttcctgattcatggcatcaatcaggatagatatcttatcaaaaattttctgacgatttttaatacaagactttttccatacccatgtataacgattggcatttgcttctatttttgtaccatcaatatatgtatgctgcaaatccacatgatcttttgaaaaaatgtaagcatttatgtccatgaatatctgttctatggaatcagtcagttcatttcggataagatttccgaaagtggcaaaagtaggtgctttcatttcgtcgagaagatacatgtaacgaatgtcattgcgacatagtttttcgatttcacgcagcgaacaaatacctttttccataaaagcaaacagtatcactttaagcagtttttgttcatcacatcttgggcgacctgttttgtagcctttctctacaaaatatcttgataggtcgatgtgatccataacctcacaaaaagtgtataccggatcagaaatatcaattaatttttcgatttctaatggtaatttcagctgacgagctgtataattatcattggtattttgatttagtagcataattcattataccaaaaaatcgctcagacttcacggtctgggcgatttttctattagggaagtttttttacagccccttttggtttaagaaagagtagattttactctgtaatttgaggaaaacgcataaagacgcttgtgcctatgccttcccggctttcgatgtagataccatattcatcaccgaaatacaggcgaatcctctggtttacattggcaagaccgatatgtttgctttcccggatactttcggcattcaattgttcacggagcttagaaagctcttccggggtcatgccaagtccattgtctgtcacgaccagttcaacaagcccgtctttggcacttccgctgatagtgataagcccattggcgctcaagtatttgacaccgtgataaatggcattttctatgacaggctggagaatgatccggatcgttttatactgataaagttcttttggaatgtcccagtgtatttcgtattttccatcatagcggatgttttgaatctgcagataatagttgcaatgttcgatctccatagaaagaggaacaatggagtctgtattttccagagtcatcctgagcattcttgaaagcgcagttgtcatttcggaaatttgattttttccaccaagcagtccaatggagatccagttgatggtatccagtgtattgtttagaaaatgtggattgatttgtgactggagtgcaatggactgtgcttttttcagtaaatggacacgttctacgagttcttgatcgacatccctttttcgagtgactgttttctggatagaatgtaaaatataacttagttcgttttgttcctgaaaaagttcgtcttcgcccatcagtatggatttatttttctggatttctttcataatttcgtcaatcggatcaaaaagccgaagcgaaatataaactgccaaaatcaacatacagatcagaagtagtataagaaacaaaatcatgaggtttcgaatggtactcaattgatttgtatatccatcaagattcagacaggtgatgacctcaaatggtgtgttttcagactttaaggatgtcagaacctgtttgttgtgtaaaataatactttgatctttcaggttttcaatttcggaaatttcttttcgggaggaaccaatccattttgactgattagaccagaggatttgcgtcccattggtaaaaaataagagattgtcctcagaaaaatcaaaaatcgaatctaactcatccagatccagattcatccatgcaattccggaggtacggtttccatatcggattggctgaaacagagtcagctgcatagtattatttccagaagtggaatctgttgtcagcatcaaggcagattccgttttatagctgtttaaatattgatcaagacagtctttttgggaagaatgttcataatcttccagtgtatcccgagagacaattttattattgttataggaataaacataaatgtttttaatataatcttttgaaagcgtaggaagacgaatcagatcctgaatagaagaaatctgatagttaaactgtcgtatttcttctgtatcatacatatatagttctacattggagttgaatccgatatagatcaattccgtctgtgcagaagacaacatatcctgaagattgtcgtaagcatcggaagtgacagtttctccgtaggaataaatgttgtttttttgcatattgctgtacacaaaatatacaaggaatcctgttccgatcagaggtacgatcatcaggagaaagatcagcttcatgttctgaaagaacaagctgttaaatttatagtttgatacgtattttctgattttatctaagatcttcatcaaagtcatcctcttgatttaagatttttttgcggtattcgctgggatttaatccggtctgtgcccgaaacagtctggaaaagtagcgaggagtcttatacccaagaagctctccgacctgataggttttgtatttcggatcttttaaaagctcaatggatttttctattttggcccgtgtaacatattgggtaaaggtctcgcccgtttcttttttaaaaagtcggctcaggtatgcagtacagataaaaagctggttggcaatctcttcctgcgaaatatcctgataaatattttcctggatataagtttttgctttttcaatcaaactgccagtgtccgtgtcttcttttttttcacttgccatcaggattctgtcaaaaattcggctgcagtactgatcgatttctgtcaaggttttcatttgaagaattgcaccatagtttaaaaaaggctgaagggagtggtggagtttttcattggccttttttagagcaccattcattgtgacaagcacgtcaatgaccagctggttacgctctgaaatatgaagatgctccacttctgcaagaatattctgaaaaactttttgagaagttttgatatttccaatcaagatgttcgaaatcatcagctttttttgctcttcgatacgccgtttgattgcaagctgtgcatttgtgcgttctgttacttccagttgaagagccggtgagcccagagaatagatagattcgtaatgactgatgatctcatagtccaatgaaaagagaaaatcttcctcaagagctttttttaaagaatccataatgtgaacatagtttttaggagtgtcttgggtgtttgtacagattccgacaagttcaagcatatcaccagctttgtatacaatatggaacaggcagtctgaagtataaatcttaaagaaattggtaagattctgttccagttgatcctgactgtaattccagatatgagagatgaaatgttcataatcacggatctgcagatcagccagaaagcagctgcatatttcaggatctatatttggataaatgatgcgaaaacgattgttgatatagtctctgttatctgtaacgccgcctaagatcagatctgtaaaaaattgttcttccaatagaggaattgcctcatccatccgttcttttgaacttttttctgaatccagttctttttttatttttaggaatgtgtttgtaatttcatctacgttgatcggtttcaacagataatctgcaactccatatttcatgcctgtaattgccagttcaaattcctgatatccactgattaaaattactttgcttcggaatttatgatcaaaaatatattttgccacatccagtccggaagcgtgtaccatcttaatatctgtcagtatgacatctggcatcacagaatcaagagattctatgatttcctgaccgtcggagaataaatctgtgacttcaaatcccagttcgttccagtttatcatattttttaatcccagacggatgatcttttcatcgtccgcaatgactaatttgtacataagcttttctctttcctttataaatttattgtgttaaatactccaaaaacagaagaaccgtttcaggatgttcagttttttgaagtactcccaaatatacaggttcatacaaagtatagttttcttcttgccaggcgggaatctttgacaaatcaatgactccgtctgtcatatacatttcataatcggaatagtcatttcctaatagtttttgccaatctataaaacaatccttttgtttgcagaattcatatgtgtccgaattgcagattacggcatctgtatcactttctgccagaaggagtgttgctaattttacataatttccggaagatgtggcagtggtgtcgattactacttcatcgtgttttccggaagtatcaagataattcaagatcttttgttctaagctttctgtatctgcttcaaggtttgcatcaaccaaagcaagtgtaagaaccggattgcgttggatgttttggatgataggaacaattaaacagatcataaatacaaacacgagcaggatcaataaaaatgaacgataataggtccataggtattccactctttttttccctttgagtgatttgattttttggagctcctgtgcccgtttttctttttgtgtcatatcagactcatattttggactcattgaatttcctcccagtgtaaaaaatcctttaatttctaattgtatatactttttgaagtgacgtcaagcgggagtcgtaatcccgatgacaattaaaaatatatagtcaaaagatatatacctttttcaaatttgtgacatataaattgaaattcgcctaaattataatgtaagcaatggagagacgctgattagaagaggaggtgtgaaatatgttaacaggagcatttattacagaggggccgcaggactggcaaatatttcaacaaagggatggaaaggcttcttttaaaatatcaggcaggtaccatgtggaggaagcagtgctggaggaggaacaaaacagtccggagtcagcacaggtttttgtacgtgtattggaagaaaaaacaggacgtgttgtaaaaaactgggttccatgcagtatgttggaaaatcaggaatggaagatggaagtgacgattccgacaggtgggctttatcgtgtagaaacaattttatctctggatgaaaaacgggctgcgttggaatggagcttccgtggagacatgatccgacatcttggtgtgggggatgtatatgtgatcgctggtcaaagtaattctgcaggttatggaagggacagcgtttatgaccctccggaattgggaattcatcttctctacaacaatggaaactgggacattgcttcccatccgatgaatgattctacaggtacgattcacgaggtaaatgcagaacgagcaaattcggggcattctccatatctgtcttttgccagaaggctgaaacaagttttgaattatccgatcggtctggtacagtgttcgcttggaggaaccagtctgggtgactggagtacagataaagcagaagggctgtatgcaaatatgattcaaacgatccgttctcaaaacggagtgaagggaattctatggtatcagggatgttcggatacgtatgatgattcttataaaaaatatgaagagaattttacacatcttgtacaagaaacaagagcggcattgcagtgtccaaaacttccatggctgacagtgcagttaaaccgtgtgactcagaaaaatcaacattcagatgtcagttggggaagtgtaagagaagctcagaggcaggcagcacatcatattccaaatgtgacgatcattccgacaacagatctgggaatgtcagatgagattcataacagttgttccgccaatctgatcatcggggaacgaatggcagaaatggcactgtattctatctatggaaaaacagatcggctggcaaacgctcctgatctgagagaagcggggtattgcccaagtacacaaaaggtgacgctgatttttgatcatgtacaagaccggctattcgattacagtgccgaaatgccgtttatgatagaggatgcctctggggagaacgatattacagcgttggagatcgaaggggataaagtacacctgacactttcacgtcctctggatggaaaaggggttgtacatggagaatggcaggcaaatccgtctccgttgccggttatggatatagtgacacatcttccgattctgtcattttatgaggtagaaatacggaacatcacagaagtttaaaaaagtggtcaaaattgtgacactgtttttcaatctgtgtcatttttttgacaacagatctatcttataataactttagaaaagcgaggaggaaggttatgaaaaagaataagagcaaaatgtacagaaaaagaaacctgcagctttggacattagcacttccggcagtgattcttctgttagtatttaattatgtaccaatgtttggtgttgtgctagcatttaaagattataaggtgccgaaggggatttttggaagtccatgggcaggattggaaaactttaagtttttctttgaaagccaggatgcattccgggtaattcggaatacattggggttaaacttattatttattgtagccggcattgttcttggggtagtatttgccctgatcatgtatgaggtgaaaaaaccggcacagattaaaacgtatcagacaatttctattatcccgagttttatttcatgggttgcagttggatacattgtgtattccttattggatccgacaaaaggaattgtaaaccagattttatctgtgttcggagtggaagggattgattggtattcatgtccggaatactggccgattatcttgctgcttgcaaaggtatggcagggcgtaggtcttggaagtattatttattatgcagctttgatgggtgtggataatgaattgtatgaagcggcagatatggatggagcgaacaaattgcagaaaattttacatatttccatccctcagattgttccgatcatcattgttatggcacttttggatgttggtaagatcttccgagcagactttggattgttctataatgtaacaagagatgttggtgcattatatccgacaacagatgtgattgatacctatgtgttccgcgcattgatgcagcagggaaatatcggtatggcgagtgcggttggtctggtgcagtcggttgtgtgctttgtaacgctggttacaacgaactggatcgtgaaaaagatttcaccggaaaattcattattctagaagaggaggcgtgactgtgaaaacaaaacaacattccatagaagcgaaaaaagaaaaaaccagtgtgtgggtacatctgttttttgcattgatcgcagtaatttgtattataccgtttgttatcgtaatttcagcttctttttcaagcgaaacagaccttgcgatgtacggattctcggtacttccgaaaaaagtggattttacagcatataaatatctgttcagaaacccggagacgattttgaactcttatatagtaacgattttgattacggtaattggaacatttttgggagttttatttatgtcaatggcagcgtactgccttgcacgcagtactttcagacataaaggcctgctcacattcttcattttcttcccgactctgttcagtggaggaatggttccaagttatatcatcaatacgcagtaccttcatttgacagatacactggcagcgatgatcctgccaagtttgatcaatgtatttcacattattatgctgcgtacatttttcaaacagataccgggcgcgttgtatgaggcggcaacgatggatggcgcaagtgaatatcacatctttttccgtttggttctgccattgtcaaaaccggttgttgccactgtagcatttttaagtgcgttggcgaaatggaatgagtggtacaatgcaatgctttatatcagagatgacaaactggtaccgcttcagtacatgcttcagagaatgatgatgaacttgagaacgttgttggatgcgatgcagaacgtaccgacttcggtaaacctgcaggatcttccgggagagaacctgcgaatggcgatgttggtagtggcaatcggaccgatgcttctggtgttcccattcttccagaaatattttacaagaggtatgacagtaggagcggtaaaaggctaagcaaagaaagcgaatatttgctctgcaggggatatgcagagttaatataaaaatcaaggaaatcaaagaggaggaaaagattatgaacaagaaaagattacttgcatttgggctggcaggatttatgacaatgagtgttgccctcacaggatgtggatccaaaggagaaaacaaggaagctggatccaaagcagagaatgatgacattgtgacggttacctggtgtgtacaaggggataaaaagccggatcatgacaaggttatggaggatctgaataagaaaatcgaagaaaagattggtgtacacctgaatttggaagtaatccctcagggagagttcaatgataagatgaagctgaaaagtacagcaggagaggattatgatctgacatttacttctaactggttgaatcagtttagtgaaaatatgtccagagaagcatttttgccaatcactgatttgtatgaaaaatatggaaaggatatcaaagaaacagttccggaatggttattagatgtcggatatgtagacggagaattatacgcaattccaaatcagcagattgaagcaagacagatgggtgtagtaattcagaaagaatatgcggataaatatggatttgacaaaacttctttgaaagatgtgcatgagttagagccatttttggagcagattgcaaagaatgaaaaggataaattcccgattgatctgagagcacagccggtattagagtctgagtatgaggatattgtaagagcaacagctcctgcaggaaacattgcagactgtgttgatctgaaaaaaggagatgaatccggtaaggttgttccaatcacagagatatctgatgctgaattaaaaatggaacatgactggtatcagaagggatatatccgtcaagatattgcaacagttatggataacacagcagatgtaaaagcaaacagatatgtatgtacattgtctgcctataaaccaggatgggattcagaatttacgaatcgtcagggcgtagagtatattgcggttccaattgaaggtacttatgtaaaatctgtttccggtgcagagacaatgacagcaatcaacgtaaattctaaacatccggaagaagctatgaagcttttgaacctggtttattcagataaagaaatctacaatgaattgttatttggaattgagggagaacactataagaaaacaggtgaaaacagcgcagaaatcatcgatagtacaaaatatgatttctcaggatatggatggattttcggtaaccagtttaatgcatggtatctgccgggacaggaagacggactttgggaagagacagataagatgaacagagaagctgaaatttctccacttcgtggatttgtctttgatccatctgctgtacagtctgaaattgcacaggttggttctgtagtaaaagaatatgcaaacggacagtatacaacaaacgatattgatgcttatatcaaagaaagaaatgaaaagatagagcaggcaggcttacagaaaattgtagatgaatgtcagaaacaggttgatgactggatggcaaaccagaaataaaaagatagaaagactataatgtaaagttaaaacggaactgtatcgttttcccaaagcgaaaacgggaggttccgttttgcgttgaaagggacagatatgattacaaataattttcgggaaaaatcagattatcaagaggcattgaaggagttgttaaaaccattgaagcaatgctattccaaaggaaaagccttggtctttattggaaataatgcggctcattatggggaaaaaacagcagggctggaaggattctccagaattctatgggggctggcaccatattgggcagatggaaaggacagcgaactggatgattggatcgtggaaggaatcacacatggatcaaatccagagcatccggaatattggggaatttatggagacggggagcaggcatatgtagaaatgggggcattggcgtatagtcttctgatggctcctcataaagtatggaagccgctagatgaggaatctaaaatacgattccagaattggctgcttcagatcaatcatcatgtgatttcagataataactggctgtttttccgtgtactggtaaactgcggcctgaaaaaagtgaatgcggaattttctgaggagcagttaaaaaaagatttaagcagagttgatgacttttatctgggagatggttggtatagtgatggagcaacaaaacagagagattattatgtaccgtttgctatgcatttttatggactcttgtatgcaaagctgatggaagatgaggatccggaaagaagcagaacatacaaagaacgtgcagagaagtttgcgaaggattttatctactattttggagaacgtggagaagcgcttccatatggaagaagcctgacctaccgatttgcacagggatgtttttggtcagcacttgtatattccaatacagaggcattttcctggggcgtgatgaaaggaatcttgaatcgacatttccgttggtggttttcacagccaatcctggatcatgaaaataaactgacattgggttatgcatatccgaatcttacagtgtgtgagggatataattcttcgcaatctccatattgggctatgaaaacattactacttttggcagttcctgaagaacatccattctggcaggcagaagaagaactgcttccggaattagatgacgtaaaaagtctgccgcatgcaggactcatcatccaacgtggtgaggatggatttgtaacagcgcttgcttctggacagtatgcagagtgggaaccggtgcactgtgcagagaaatacgagaaatttgcatattccagctattttggatttcagacaccacgttcttattatggaatcggtgcagcagcgccggataatatgttggcatttttaagcaatggactgtattttatccgccgcagatgcaaagaagtatactgcgagaatgatacacttgtgtccagatggagtccgctggaaggggtagaagtagagacaacacttcgtcccaatggaaaaggacatttcagaacgcatgtgatccattcggataaagaatacactgcagtagaaggtggtttttctttgccgtggagagaaataacagaaatacaggcagaaaaaggcgagggaaatgtacgggtatttggaccggcaggtgagagccttttaaagctgcaggagggcgaaggtgttggagagatcacattctgtgaagcgaatgtcaatttgtgccataatcgtaccgtattgccgtatctgacatatcagattaaaaaaggggttactaaaattacagtttatgtggaaggaaatgcaggaaatgacgagtcgtattttaccgttaaatgaagcggaaggaattttttttccggcttttgacaagcatttatgtgtggatgaagagattgcgatcaatcgaggaacaaaagagcggttatgggatggactttctttctgcggcagcaaagaatttgatgtctgctggcaggggaatgtggatatcaacggctatgaccggatgctttgttttttgcgagttccgccaactgcacagattcgggcagacgttgtgatagatggaacggaagtgactttgtttgagacaatgaagggagaagaagaaccgttagatatcgatgttttgcttccagtgtttccagaagggattctttccagagtatgttttcatgtgacatcggaagcagagcagacaattttgtttgtcagctggcttggagtagcaaattccgaaaagcaggaggtactggagaaaaacgtaccggtttggaagcagaaagctgcagatgcaatgcttgaagtaaaagcgggggaaatactggatggggttctgttttcaaaagaagaaggaactgttttaagacagcaattacaaaaagataaaaaagcagcagcactgatacgaaaactggcagaagaagggatgcggattcatccggaagagattatggcagaatatgttcctgttttacctcatatgtatcgctttgtaagaaaaaaagaccggaatcgtccggtaccggaaggcccgatcctgaatcttgcagttgctggatgggtattggaaaatgcagaatatagcagacgatcagcagagctgatccttgccctccttccgatgaaatggtttgaaggcgcagtatgcgatattccggaatccggttttcaccatgtttgttttacggaagagcatttgctggcagaagtggcattggcctcctgtttcctttccggtgtgtttaccgaagaagcatggaagaaaattgcggataaattgaaagatatctggagctttgtaagagagaaatgtatggagccgggataccgaaattatatgaatcagggcatcgtaagcaatcgggggttgatgcttggtgcagtgcttttgcaaaaactgtgtggaggctatgaagagtttttagaggaaacgtaccaaagacatacaaaaattgtgagaaattatttatctgaaaacggacattgtgcagaaggtcctggatattttgaatattctttttccacttctgtattgatgtggcatgtgtatgcacattataaaggatgtccagtgaaagatgtggtgccagagccttttgtgaaagccggaagatacctggaagcagtgacatcagcgaatggaaaatatggacaaaaaataccgattaattgtacgaactgtgaaaaagatggaatacataagacattgctagttgttttcatgacaatggtgtgtgattttccggaaggaaatgagtatctgaaagcaagattttccggagaagaaattgtagatacagaaaacagttttgattatctgttttatacatattacaaagaacagcttcagcttcacccgtacagtcatcctaaggaagaggaaatcagttttaaagaagagggattgttgagttttcgtacaggaagtacgaagcttttggtgacggcagaaagaaatcctcttacaggtcattatcatgaagaccggggcgggattgtattggaaaatgaaggagaaatccttctgcctgagcttgggacaacaagttatgcaaattctcagtgtattttgatggaaaagaaagaatatcacaatttggcgtgtccgaaaaatctggaaatgattgcggaaagtgaagtgggaaaaaatgcggcagcagaagcagccttcccgatcacagaggagctttctttaaaagacatggaaacaccggaagcaaaagtagtttatacgaaaagggatgcagaaggctatgtgtttgaagtggaaacaggaatgctttttggagaaggggtgatcggaactcgccggggaatcctgaaggactgcacactgaggcttttagaccgctggacatttccagaggaagaggagcttttgatcacgtttatttcttacgatccgtggaaggtatgtaagaaggagaaaaaggcagaatcaggaagaatgacatttcgagttgaagcaaatggaagatggaactttgaaacagaagaaggaatgtttgattcagaaggaagggcagttcatattttgagaattcatacagaaaagggagtggtacaagaagtggaaacaactatttcatgggtggaggcaaaaccgtcgccacaaaaggatgcaaaagaaaataccagggcgtttcaggcgctgttaagtaaaggggggacaatccgtatagaagaaccgggaatttatgacatagaagatacattggtgattgagagcaatacgcatttgatttttggggcaggagtaaaaattcgcagagcatcctcttccatcggttcgtttgcaatgatcaacagaggagcatttaccggggaatatgatacggacattacaatcgaaggactacatttgattacaaacggggtggaggcaagacataatgcagcggtctatggactgaccggagaattgtcgttcttccgtgttaagcatttgaaaattttcgattttacctgtctggatctgccgagattaagctttggaatccatatctgtacctttgaagatattgtgttggaacggcttcggatagaaggaagaaaagatgccgtacacctcggtaccggaaagcagttcgtgatccgacatggattgttccgtacatttgatgatccaatcgcgttaaatgcacatgattatgcagtggcaaatccacagcttggatggattgaagatggtctgatcgaagattgttatgatttggcagataaagatacaacgggatatttttgcaggatcctggcaggcgcatggtgcgactggtatgaaggaatggaaattcagaattcggatgcagttgtaagcaatggaagagtatatcgtgcgttccagcagccggatggaacaaaatatatttctaaaacgccaccgacgcatgataaggggatggtgacactggatggaatcaactggtgtatggcgcaggaagatgtgacctatcaatgtggatgcagaaacattcatttcaaggatattcatttacaaaaagaacgagaaatggcattgtctattcattttgatcatgatgagtattcgagaagtgtgtatccgggggccaaaatgccggtacagcagaatctggtttttgaaaatgttacgattgaaaataaaatcggctgtttggtcagaagtatcaccccggtggatacagtgaagattgtaaactctacaatttatggaaaatgtatgcagctggagtgtctggaaagtgaaaaaggagcttattccgatacacagatacttttgatgggaaataccatttgtataccagataatgaaatattgattgaatgtcaggatggaagaagctgtaaatttacatctgtgggaaatttgacagaagattcttttcaaccgaaattgcagggagaagtaagataaaaaccgggaggctggatatgaaattaagagaagaagatataaaatgggcaaacgaagtctgggaaaaactgcagaaaaaacttggagtggtatcagagagggtaaaagatatgattccaggagatgcagatgaaaatggaaggtttgttgaccgcggaaatgatattttctggtggacaaatgggttttgggcaggattgctctggcagatgtaccatgcgactatggaagagtcttataaagaatatgctgaagtgattgaaaaaaaactggatatggcattggaggagttctggggactgcatcacgacgtgggatttatgtggttattgagtgctgtggcggattatcgcctgacaggaaatcaaaaatccaaaaacagaggattacatgcagccaatattctggcaggaaggtacaatccgaacggacattttattcgtgcatggaatccggaatgtgatccttccatggatacaaccggattgatgatcattgattgtctgatgaatctgcctttgctctactgggcttctgaagtgacaggagacaaccgtttttccagtattgcaaaagaacatgcagatacggcgctgcgctatattatgagagaagatggatcctgcaatcatattgtggaattgaatcctcaaacaggagaatttgtaaaatcgttaggtggtcagggatatggagaaggttcctcctggtccagagggcagagttgggcagtgtatgggatggcattgtcttatacttataccaaagaaaaaaaatatctgtatgcggcaaaacaggcagcgcattactttattgcgaatgcggcgcttaccgattatattccgcttctggattttagagcaccacaggaaccgaagctggcagatactacagcgggagtgatcactgcctgtggtctgctgcatctgagccaatatgtggatgaaatggagagaccactgtatcaggaaagcgcaatgcgtatgctccgggcgatggtagagcggtgttgcgactgggaagaagagaatgatgcaatcctgggttatggcagtgttgcttatcacagaaatgtacattgtccgattatttacggagattattttttagtagaagcgattctgcgcattctcggaaaagatattttactttggtaaacgtgtaaagaagtccactttcactgcgtatttgagctgcggtattcgctgggagtcatgcgttcccattttcggaaagtagtgcagaaactgctttcactggaaaaaccgcaggaaaatccaatttcttttaccggaatatccgttgttttcagaagaaattttgaggctccgatccgggttgcaatcaggtattgatgcggggtcatgcctgtctgacggaaaaatacccgggtaaagtaataggggcttaaagaagccaggtctgccagggtttccagtgaaatggattctgtaaaatgttcattgatataagaaataacagtagaaagagagggttttgtaatgagatccatctctttttgctcttcatagagaaacaattctgttaacatgccgatgatgtcccgggaaagttttgcttcaacaatcggcatgctgttttggaatgtgtgatagatatgccggagtgtctgttttatggcagaagtatttccgggtgtccaaatattgccatgtgcatgaataagatgttcacaataatctctgcacatcggtccatcgaagtggatccagagagattcacagccggttttgctgaagtactggtggggaacatagcagtcgagcagaataacatcgcctgcagaggctgttttgacgctgtctttttgaagaatgctgcaagttccatcgattatcagcatgagaagaaagctgtcataattatttcgcttcaggtgatacccgggttcgtaatgaaaatgtccgatacagacggggtagaaaaataatttttgtgcaagggcactgggagtatatacataataatcagaatcagctgttacatatttttcataagagcgcatggaaaattcctcctttttttcagtgtagcagataagggggaaagatacaataaaaagagcaatttttaaaaatagaagagcaaattaaagtaatgatttatgaaaatacacgatatataatgaaaataaaaaaagcaatttaataaaattcaaagaggaggaatttttatggatacagtaaaaatctgggaagaaaaagtgagtattccgacttacgaggtaggcgcacctgacaaaaatccaatgtttttggaaaaaagagtttatcagggaagttcaggaaaggtatatccttatcctacaacagaaaaaattgcacacgaaaagaaagacaaagtctggaatgcggtatatctggaaaatgaatatttgaggattatgatcctgccggagcttggaggaaggattcagagagcatatgataagaccaatgactatgactttgtatattacaatcatgtgatcaaaccggcattggtaggtcttgcaggaccgtggatctcagggggaattgagtttaactggcctcagcatcacagaccgacaacttatatgccggtagatcatttgatccaggaacatgaagatggaagcaagacccttctggtgcatgatgtagatcagatgtatggaacaaaaggaatcgcagcatttacactgtatccgggaaaagcatatattgaaattagagggcagttatacaaccgaacaccattgccgcagacatttttgtggtgggcaaatccggcagtaccggtaaatgataatacacaatctattttcccgccggatgtacatagtgtatatgatcatggaaaacgtgcagtttccagattcccaatcgcaaaaggtgtatactataaacatgattacagtgaaggcgtggatatttcccgatataagaacattccggtccctacgtcctatatggcagaaacatcggattatgattttgtgggcggttatgattatggaagagaggcaggacttctgcatgtggcagaccatcacatttcaccgggtaaaaagcagtggacatggggatgcggagagtttggacaggcatgggatcgaaatctgacagacgaagatggtccatacattgagttgatgacaggtgtgtatacggaaaatcagccggacttcacatggctcaaaccatttgaagaaaaaacattcaagcagtattttatgccgtataaaaaggtaggagcagtaaaaaatgcgacaatccacgcggtattgaatgtggagatcagaaaagacggagcaaacgtaacggtttatggaactgaaaaatatgattctgcggaaatcgtgattacgaatgctggacaggaagtatatcgtaaatccacagtattgtcaccggtagatatttttgaggagaacgtcgctttcgcatgtgaaaaaccacaggatgttatggtaaacgtatatgcagacgggaaattgcttgtgacatatcagccggaagaggagaagattccaaaactggcagaacctgcagaggcagcaaaagagccggaagaaattatgacaaacgaagagttgcttttaacagcacagcatatcgagcagcacagacatgcaacatatctcccggatccatattatctggaaggactgaagagagatccggaagacagcaggatcaataatgcctatggaatgctcctgttcagaagaggaaactttgcagaagctgaaaagcatttccgtatagcagtgaagagactgacctggagaagcccaaacccatacacaagtgaaccatactacaacctgggacttgcgctgtatatgcagggaaagatggaagaagcatacgatgcattctataaagcaacctggagcaatgaacagcaggagatgtccttctattatctgggagtgatcgaggcacagagaggaaattacgaagaggcgctggaactggtagaaaaaggtttgatcaaaaacctgcataacatcaaggcaagaggattaaaagcaatcttattgagaaagctgggaagaatttcggaagcgaaaaattggttggaagaaaacttgaaggtagatgcatttgattatatctcattggcagagcttgctgagatcggcgaagaacgtgaggcacatctggagtatatgaactgcctgatgcgtgatttccaggaaaactatctgcaggcagcaagagactatgcagaggcaggatgctatcaagaagcagctgcaatgctggagcagtgtacgaaagagtatccgatgcttgcatattacaaaggatactatttgaaaaaaatgggagaaacggaagagtgcatggaagcatatcagaaagcagaacagtattctccactgtattgtttcccaaataaactggaagacatcatggtgttagaagatgccatttccatgaacggcaaaggtgcaaaagcttattattacctgggaaatctgtattatgataagctggcatttgaaaaagcaacagagctgtgggagaaatcagtagaactggatgacaattatccgacagtgcatcgaaatcttgccctggcatactacaacaaacagaatgatcctcaaaaagccaaagcagaactggaaaaagcgtttgccctggatgaaacagatgccagagtgttcctggagttggatcagctttataaaaaactgggtgtttcttttgaagaacgtctggaaaattatgagaagcatttggatattatttccgaccgtgatgatgtaatgttggaatacgtgacactttacaatcttctgggaagattcgaaaaagcttatgagactatcatgaatcatacattccggccgtgggaaggtgcggaaggacgaatttccacacagtataaagttgccttggtagagatggcaaaacaacaaatgatgcagaactcctatgaaaaagcagaagaacttctcaaacaggcgctcgtatatccgttaaatctcggagaaggaagactggaaggaacaaaagacaatcatatttattactatcttggaatggtaaataaacagctcggaaaagcagaagaagcaaaggtttgttttgaaaaggcggaaatgggagaagacgagccggcaggaattctgtattactatgatcagccggcagatatgatcctttataaagggcttgcctgcagagaacttggaaatacaaaggcttcttacgcatgctttaataagctgatggattatggtgagagacatttatatgatgaaatgaaaaatgactatttcgcagtatcacttccggactttttaatttttgaagacgatatgaacttaaaaaataaagcacattgtcattacctgatgggactggcaaatctgggattgggagataaaaatgcagcaaaagaacagtttgaacagtcgatctcttatgatttcaatcatcagaacagcaggatctatctggagatggtgaaagcagaatgtgaagggatgaatctatgatttatttaaaggtaatcaataaagaaggaaataaaattgcggagaatacaggagatagagaagtaaacctggttgtagagcaccaatatgaagagggggatacgatctggatcaaaccagaagaagtgccgggatattattggctgcagattgacgatgcacttggaaaatcgctggtgtatatgacaggagagcagtcctatgaaattccgttttctgaaaaaagaatgaatatttccaataaggcattttcaggggatgttcacttactttctatgcgaaaagcaaaacaatttgaaattgagagttatcggaatcttgcatataatgtaaatgatcagcatggggacgttcattgctatccccatgcatatgcaaatgtggaaacaagaggagaatccgtttttgctgccaaaaatgcaatagatggagtaactgctaatgtggatcatggaaaatggccatatgcttcctggggaatcaaccgtagggatgatgcagaatttacgttggattttggaaggacagtagaaattgatcgaatcatcatttacacaagagcagacttcccacatgataattggtggatacaggggacactggaattctcagatgacagcaatatgataatttccctgcagaaaacaggcgagggccaagaatttgtattggaaaagaagagaatccaatggttaaagttaaaagaattgatcaaagcagatgatccatctccatttcctgcattgacacagattgaagtatatggaagagaagttttgtaggacaaggaaagagaaagaaaaagaacaacactggaaatgaatcgagagggcaggcggaaactgccctctctatatcttaggaaaatgatgtaaaatgtaaattagaaatctaattcatataaagttccgatttcctgggagagaacatcacagccgttttctgttacggcaatgcctttttcccagcgaacaccaaaggtatctgttgaaatgaaggtatcgatttggaatgtcatgttttccagtaaattgtagttggaatcagtttctacccaaggggcttctacttcgatcattcccgtgccatgtaaaggtccataaacaaaattatctttaaatccattgtctacataatagttataaaagtttttggcgatctgagatgccgggattccagctttaatttgtttttgagtccaccgatgagcctctaatccgaaaagaaccacttctctgcgtcttccttccaattttcccaatacgattggataaccgacagcggcagagtacccatcaatccttgcggataaatttaattgtacgatatcattcttctggaattcccggtacgaagaccgtgaaatagcatgtctggtagaggactcggagaaaacgtacatagggagtccttcatattctgcaccattttcataaattacgcgctgagcgactccgaccatttgcaattcggtcattcctggttgtatttcctgaataacctgctgcattgccaattcagcaatgcgatatccttctcttaaacaattgatctcattttttgattttacagatcgcaaagcagtcatgatatgatctgcgcgtacgatttcagcatctggaaaagcagctctgattccatccataatcacaacggatgtatccaaatagctggctacgccaatccggatatttttttgtgtcactccaattgcatgaaatacatcctggaaggtatctggagttaattccggataggccgggtctgcactctctctatattcctttaaaataaaaattttttcaatcttagaacggtcagcggcaaaatagcggctttcaggtcctaccataagggcagcatctccggatgcagagatggcaaccccggcacgttcaaaaagtggccagaagccagaaaaatatcttgcatttgcgtaatcagcttcattcgaattgacaatcagaacatcaagatgttctttttcaatcagctttgcagcattttggattctttcctgatattcatgatcaggtataaaaattcttttgtttgtactcattgttttctccttttctatcatttgatatggttgatgtcaggctaatttgtgttgtacccgggtgttgtataaaaagctacagttcttggatcagctctgccgtattgtgcgatgacaggacaatcactttccagcataatggcatattgttcgctgataggcacagtatagttcccaaagtcctgttcactatttgtccgaaggcatcgtacacgtctggcatttactgtgacctcagacagttgaacaggatctttgtctgtgaaaaacaaggtaagcgtaatatgtgcatcacagtcacatgtattcgttattataatagattcatgtcctggtatactgtttacgccttcaggcggacattccgcatctggaaatatccagattttacttccataattcataaagttcacctcatagttagtcgtataagttcggagcgattttatcctcgtccatattttgagcatggtaccaatagcaaggggttgcaatgtcggagacagtttcattgtctgcgatttttgttaatgtttccacggtaacccggcccatttccataggagcctgtgttacagcacccagcataattccgtcacgcacagcagttttgatcgttgctccagcgtcaaatccaaccgccaggacattttgagttggatcagatcctaaaacatttaaattgacattggctgttaaaattccttctgcggcgacctgattagagccataaatagcaactgtgtcttctttatttaaaatttttgaagcttctgttgcacataattctacggttgtctgtgcagggacagcaacttcaattacgatgtccgcatctgagatatttccaggatccttacagtggtcggtataatattcatgtcctgttacggctacttttttcccgtcatttttcgccaattcgctaaatttatcgataaatcccattcctctggaaataatggattcagaagttgcttcctggttgatttccccaattctaaccggtgaagaagcagcagctaaggtatcttttaaagcatcgtacaaattttcagcagctaattcccctgccttatagttgtcacttgctattgtggagtagacagatccttccggggcatctggtacacccgagtcaaaacacacaacagggatttttttattgtaagctttctgcaaagaatctaacacagaattttgatcgcaggcagcgattccaatcccatcaggtgagctgttgatcgcgctgttgatcatatttacctgatcggcaatgtctgactcagtgttaggtcccgtacaatttacatctacattgagatcagcggcagcttcctgaattccaagcgcagcagcctgccaataagaagattgatagctttgcacaataatctcaaaatgatatttgcctttgtctttatcagttgtattatctgcctgcgtattttgttcaccacatccaaatagacatgagatggatacacaactaagtaatattgctgtaattaccttttttttcatggaatgtacctccttttgatttggaataaaaagtgcactcttgattatgccctcattgtaagagttttgctcagcagagtcaacaaaagagagtgaaattaaaaagcattttattaaaacgtttaactgtatttacaagatggaaagatttgtgatattctaaaaaaaaatgaaagggaagttatttcatggtaacaataaaagatgtcgcgaaaaaggcagatgtttcgattgctacagtttctaattatttaaatcggacaaaacctgtaagcaaagaacttgggacaagaattcaaaatgcagtggatgaattgggctattctctcaatctgaatgcaaagattttgaagactgcacaatatatggatattggtgtgattttaccaagtttaaatgattcttattatgtacagctttttcaaggaatcaagacgtattttcaaaatacgaactattttattaatttggtgttttccaataatattcccgaactggaagttaccattgctcaaaatttgaaacggaaacaaatatgcgggttgattttagtttcatgtcagccggaaaactggaaattttattacgataattttacctcgaaaaaaattcctttggtgttgatcgacagaaaaatatatggattggaaaccaattttgtgtcttgtaataatcgagtcctgattcgaaatatggtggatgaattgctgaaaagaaagatggaaaacatatatttgctgtcagggccagagaaattttactgtgaactggaatgcatgaaaggaatgcgggatgcatttgaaaacaatggaaaacagaacgtttctgactattttattcaaaccaacatggggaaagaagatgctttccgcaagacattacagttgttaaagcggaagaaaccggatgcaattgttacaacatcagaatcgctggcattggggattattgaagggattcgtttgatcggatatacaacggtcgatattccgatatttacgttgggagaacagcactggaatctccatacgcattcttttgcaaccaattctctggtgcgtccggctatgaatttgggaaagacagcttcgaaattattattagaacagctagaatcaccattgacaaaagaatcggagaaaattatattggcgggatgcagttcagactgggagcatgaggagaggtatctgtcggtaaagaaaaaaacggaatcagaacagaaaaaattacgggttttaatgttggataccccacaagtcgaatctatttccggattgattcctaattttgagaaaagaacaggaataaaaatggaaattattacaatgcctcataatgaactgtacaatacgatcctaacgacgtattcagaaaatcaggaaaaatcttatgatgtgtttatgtacgatatgccctggctttccttcctggccgcagaaggaattttggaagacatttctgacaaaatgaaagagatggatttagaactctttttcccgggagctctgaagtattatagtatgttcaatgaccgatattttgggattccgttcatgtatgcaccacagatacttttttatcgaaaagatttgtttgaagatgttgcggtcaaaaaagagtacgaaaagcaaaacaatatttccttgcgaccaccggttacattgaaagaatttaatacaatttctgaatttttttccgataaaacagatattatcgaatatggaacttcaattccaacggcttataacgaatgtttaacgccggaagtttacatgagattgaaagcatttggcggacacatttttgatcagaaaggaaatgtagtgtttgaatcagaccagacactgcgtgcatatattaatttcctgcgagcaataaaatttgcaaaaccagattatagaactgcaacagatatgagcgcagcgcaggattttatagacggaaaaatagcgatgttaatttcctatccatcatttttgagaaatattccggatttgagaaaaaatagtatgataggttctatcgggtatcatttaattcccgggcgaacccctttattgggagggtggagccttgggatcaatcagcattcttcaaacaaagaagaagcatttcagtttttaagatggacgtgcgaagaacaaacagcgaattatactacgttgctgggagggctgacagtcctgacaaatacttatgtaaatgatgaattatcagatctgtatccatggctacctttatattattctatttatcaatatacgaaaccagtcattccgccaaagctgtcgaacaataaggtgattccacagtgggaaattgatgaagtagtttgtaaatggctatataaattattagattctgaaatagaagtccccgagacgatctcagaaacgcaaaaagctttgcagatactggcaaagcaatatcaataaaaaattgctgtaaaagactttttcagtcattttacagcaatttttcttaatcacggaacatcttcatccccatccattgttgcatatgatccaacattttttcatccggatcgatcaggatacaggtcattgtctgttcagcaggaagtataatggcataagtgccttttcctgtaccggcagagaaatcttttgttttttctgtatgtatggaatccagccgatgtgaatcctttggcgcgatgatctctgcctgctggatatccagagacatcatttttttgcgttttgatttgctgtagatcgcatcaatctccagatcatggttcaggagcgtatactcatactctacatccagttttggaaatacaaagtagtagaccaaagctccgagaaggatcgtaaccagtacggccagagatccaataaacagcataccgccgcaaagtacaactacaagagcggcaatgcataaaatacggatgacaagatccataggtcgggatttgcgaggaactaattgttcataaagtgcgtcattcatgtgatatattcctttctgtatataaataattcattaccattgaggcaatcttaaatgtcatggcatcttcaaattggcgaagatccagaccggtctgtttttcaatctgctccagacgataaatcagggtattgcggtgcatgtgaagctgtctggatgtttctgcaatgtttaagttattctggagaaacttattcacagttgccatgatctcttcatccagagcttgcgggatctcttcaccataaatctcatggagaaaattctcacacaaagagaccgggagccgataaatcagacgtccgatcccgagacggttgtatggaaacaccgtctgttcggaataaaacagtttgccgactttcagtgcaaggcttgtctcacgaaaggcggaggaaagatccaacagattatgcagaatcttgctgtaggaaacacggacacgagccagagcttctgcgttcacagtatctacgatcatgcgtgcagtgaggtgcacactctcctgtgaaggatccgcaagaaatttgaccggacaaaggatcgcgtaggaagcttccgtcaatggaatgcggaatgcacccgactgagatgggaagaggttctttaaaatctcagaaatctcttcatccagactgtgagaagtctccataagataaagaatgcgaggctcttccggtgcaatatgaaggcgggcagcacggtcatacacgttataagcagggatgctgtccgtcatcaggctttgaagaaaatgaatcttattgtatttttctttatatgcggaagagaggagctttaactgctccagagctttcgtcacttcttcttctgtttctgcgtgaacatccatggaaatgcctgtaatgcgtttcagatctgtcaatgctttctctaattctgctgtatgattcataatgtttctcctgatagacagagaaagagctgcacgattgtacagccccctgtcatttttaattatttgtattttaaaacattagtttgtaatcgtcaactctgtttctttgtcgaagatgtggatcttttccatatccagagcaaacactgcgtgatcaccggttcttaaagttgtacgaggatttacgcgggctgtcatctgtgtaccttctaagtcaaagtacagatatacttctgctccaagcagctcgtaaactttgattgtagactcaatgacactgtcaggtgagttgctgataaatgcctgtgaatcatgtacgtcttcaggacgaataccaagaacaacagtttttccgttgtatccgccatcgatcagagcctgttttttagatgcaggaactttcagtgtatgttttccaacagtcagtgttacatcatttcctttgatatcaacaacagcatccatgaagttcatctgaggagatccgatgaatcctgctacgaacaggttgcaaggtgtgttgtataagttctgaggtgtatctacctgctgaacaacaccatctttcataacaacgattcttgtaccaagagtcatagcctctgtctggtcatgtgttacgtagatgatcgtagcgcccagattttcatgaagtttggaaatctcgatacgcatctgaactctcagttttgcatccaggttggaaagtggctcatccataaggaatacctttggattacgaacgatcgcacgtcccatagcaacacgctgtctctgtccaccggaaagagctttcggtttacggtcaagcagtttctccagatcaaggattcttgctgcttcttttacttttttgtcgatttcatctttcggaactttacgaagtttcagtccgaatgccatgttatcgtatactgtcatatgaggatacagagcatagttctggaataccattgcgatatctctgtcttttggttctacatcgttcataacttttccgtcaatctcaagtgtaccgccggaaatgtcttccagaccagcgatcatacgaagtgttgtggatttaccacatccggaaggtcctacgaagatgatgaattctttgtcttcaatgtccagattaaaatcttttactgcatggaatccatttggataaattttctgaattccctttaatgataaacttgccatttgaaatagcctccttaaaaatcagtgtttcgttgttttctgtaattaagtataccgtcaggggctaaaaacgacaatgttacgagtaactaaaaaaaacagcttagggtgtacaaagtgactataggagttctttgatcatgggaatcgacagcccgtcctggcgaagagaacgaatctgttcaatccttctgacagaagcttcccgcggaaaacggcgtgtcagattttcttctgcctgttcaaaaggcagcattccttcttctgtataaaattttaacgtactgtaccggcaaccggtgatgcgcaccagctcgccgatcgaaacatactccgaggccagaattttctccatagaacgttgtctggacataagaacactcctttatcttatataatatatcttctaagctgaacaccaaatacaggaacacgataatatctgtgctgggttgggatacattcataataaagattgtcaatctgcagcagcggcactgcgcctgcacggatcacatgcacttcgtttccgtttccttccagcctggcgatgacgccttccagtcgcttttcggcattacaatacaattcttcagactcaatgaaaacagcactggaacgttccataaatggaacctgaaataaaacaccggtaccgagcttggtggagaagatctctttctttttcgaaaagaacccaagtgctgcactatcaagcgcattgtggatggaaatggaaagcagtgtttttgccagaggggagtttaagtataactcattgattctggaagtcatgtatttttgttcttcttttgaaaatagatcgtaaaaacaactgctctcacgcagaagccagagcatacatacggcttcgtctgatacgttcccttcttccatcaattcggcccggatactttctgtctgccgtgaatattcaccgaaatccgtccggtattccagaatcttgtttccggcagaagaaaactccagatcacagctgaccagggaggacgcttctgtcatcagtcccagattatttaaacgggtatatacggtatgttccagctcttttgcagcagaagcagataagtgggcggcttcctttaaagaaacagataaagcatccaatccggagagatattcgtcagagtcttcggaaagcgcttctgtttcctggagaaatcgatccagtacgccggcagcagagacacagcgaatggcagcttttttggcagtagaattacgtgtgctgtttaaagcgtttaatgaaataagtgaaaaacgatcctgtaatgataagtttgtcataggaaaaacctccttgtggataagaaaattgatatttacttattacttactacttacgatttaagaatactacgatggaggaaaaaatacaagaaagttcatacaggttgtcagaaaattccgggaaagacccatgcgttgacgaattcatgcaaatccgctacaataacctcatgtacggtttatcaaaagccgaagtctgatagaaaagaggagaaagtatatggcaaatccagttgttacatttgaaatggcaaacggtgatatcatgaaagcggagttatatccggagatcgcaccgaacacagtgaaaaattttgtatctcttgtaaagaagggattttatgacggacttacatttcatcgtgtgatccgcggatttatgatccagggaggatgtccggacggaacaggtatgggaggtccgggatatacgatcaaaggagaattccttcagaatggtgtgacgaatcatctggcacacgatgaaggcgtcctgtctatggcacgtgcgatgcatccggattctgcaggaagccagttctttatcatgcatcagaaatctccgcatctggatggtgcatacgctgcattcggaaagatcacagagggaatggatgttgtaaataagattgcagagaccgccacagactacagtgacaagccactggagccgcaggtaatgaaaaaagtgacagttgatacttttggagaagagtacgacgagcctgagagagtatagtcaacgagataaaaaagcagccaatgagaaattggttgcttttttcttctataaaaatgtgttatactaagaaactggtaaaaatgaaaggatataagacacaatattctggtggcacagatcctggcaagtaccgggattatctttgtaaacagagaaaaggagtctaaaaatgatacagaccaaagagctgatctatgaatatgaaaaacgagatgaagaaggaaatatcattggcatgaaacgagccattgatggtgtagatatcgatatccccgagggttcttttgtagcaattctcggacacaacggttctgggaagtcgacactcgcaaagcatatgaatgcgatcctggttccatctggaggaaccatgtgggtgaacggaagagacacaaaagatccggagaatctgtgggatgtcagacagtcggcagggatggtgtttcaaaatccggataatcagatcatcggaactgtcgtagaagaagatgttggatttgggccggagaatctgggaataccatcggatgagatttggaagcgggtggaagagagcctgaaagacgttgggatgctggaatatcgaaagtcttctcccaacaagctttccggggggcaaaaacagcgtgtcgcgattgcaggtgtaatcgcaatggaaccaaagtgtattgttttagacgagccaacggccatgttggatccaaatggaagaaaagaagtgatcaagacagtacgccgtttgcagaagactaaaaaagtaacggtgatcctgatcacacattatatggaagaagtcattgatgcggatcaggtatttgttatggacaaaggtcatgttgtgatgcatgggactccgagagaggtattttcgcaggaagaaatgttaaaaaggtatcgtctggatgtgccgcaggtgacgatgctggcggatgaactcagaaacagaggtctggatattccaaaagggatcctgaagagagaggaactggtggaggtattatgtcaattgaattaaaacacattcaatatgtttacggtcagggaaccgcatatgaaaagaaagcgttaaaagatgtcagtcttgagattccgcagggacagtttctggggatcatcggtcatacaggttccggaaagtctacgctgatccagcatctgaatggtctgatcaaagctgcatccggagaattgtattacgaagggaaaaatgtttacgaagacgggtatgacatgaaatacttaagaagccaggtagggcttgttttccaatatccggagcaccagttgtttgaagtagatgttttgacagatgtatgttttgggccgaaaaatcaggggctttccaaagaagaatgcgaaaaacgggcaaaggaagcgctggagctggttggttttccggaagaactgtatttgcagtctccgtttgaattgtctggcggacagaagcgaagagcggcgattgcgggggtacttgccatgcggccaaaagtacttgtgctggatgaaccaacggcaggtctggatccgagaggccgcgatgagattttggatcagattgctgatctgcacaagaaaacagggattacagtgattttggtatcccatagcatggaagacattgcgaaatatgtagatcgtattattgtgatgaatcggggggagatgtttttagacggtactccccgggaagtatttgcacattatcggaaattggaagaagtcggacttgctgctccgcaggttacttatattatgcatgatctgcgtgagagaggatttcaggtcggaaatgatgtgactacagtggaagaagcagcagatgagatcatgcgctgttttagggagaaacacctggaggaaacaaaattatgattagagatattaccatcggacagtattatccggcgaacagtgtgatccatcgtctggatccccgggtaaagattgtggcaaccctgttgtttttgatctctttatttgtgcagaaaagtgtacttggttatttgacagcaacgttgtttctggcaggtgtgatctatctgagcaaggtgcctttgaaatttattatgaaagggctgaagccgattatgatcctgttgttgatcacagtggcgttcaacctgttcctgaacaatggaggaaaggttctggttcatttctggatttttaaaatcacagaagcaggactggagatttccgtgtatatggcaattcgtctgatttatttgattgcgggatcctcactgatgacatttacaacgactccgaatgcattgacagacggaatagaaaagctgcttcgtccgctgaacaaagtaaaagtaccggttcatgaagtggcgatgatgatgtcgatcgcacttcgttttatcccaatccttctggaggagacagataagatcatgaaggcacagattgcaagaggggcagatctggagagcggcaatatcattcagagggcaaaagccatgattccgatcctggttccactgtttgtatctgcattccgccgtgccaatgatctggcaatggcaatggaggcaaggtgctaccgcggcggggaaggacgcaccaagatgaaaccgcttgtgtatcacagtcgtgataaaattgcatatgccgtgacggcagtctatctggcagcggtgattgttcttggaagaatggtgccgtttcacatatggatattctaaaataaaggaaataagaacggatgaaaagaataaagttaacgattgcttatgatggaacgaattattgtggatggcagatccagccaaatggaataactgtggaagaagtgttaaaccgtgctttgagaaagctgactggggaagagatcacggtaatcggagcaagccggacggattccggagtacatgctcttggaaatgtggcggtgtttgactcggagacttccattccgccggaacgaatctcgtatgcattgaatcagagattgccggatgatattgttgtgacagaatcagaagaggttccgccggactggcatccacggtattgcaattccagaaaaacatatgaatatcatatcttaaatgccaaaataccggatccgacaagaaggctgacaagatattttgtttcttttgatctggacattgaaaagatgagaaaagctgcgcagtatctgaccggaactcatgattttgtgagtttttgtaatgtgcgcacagatgtggaagatacggtacgtacgatctacagtctggacatttttccggatggggacgaggtcaccattcgaatccagggaaatggatttttatataatatggtgcgtatcattgtgggaacactggttcgtgtcggaagagggttttatacaccggagcaggtcaaagagattctggaagcaaagaatcggacagcagctggtgtcacagctcctccgcaggggctgtttcttgtagggattgagtatgaaaaaaggctctgatccctttttttataaagaaaagcagaagaaccctagaatttacaaaaggaaagcaatttttcgattgtacaaaaggtgaaaataagtatataataaagatgatttgtccgttgggataaataaagatcggccgccttttcaggggttcgcgggctggtatggatagaggaggaaatgaaacatgaggattattgaagcaaaagactacaaggatatgagcagaaaagcagcgaatattttgtctgcacaggtaatcatgaaaccagattgtgtactggggcttgcaacaggttctacaccaatcggagcttatgaaaagctggttgaatggtatgaaaaaggagatctggacttctctgaggtaacatctgtcaatctggatgagtacaaagggcttgaccgtaccaatgaccagagttattactacttcatgcatgagcatctgtttaatcatgtaaacatcaaagaagagaatacaaatgtaccggatggtacacagccggatggtgataaagaatgtgcccgttatgaagaactgatccgttctctcggcggtgtagatcttcagcttcttggactgggacacaatggtcatatcggatttaatgagccggcagatgcatttgataagactacacattgtgtagatctgacagaaagtacgatcgaagcaaacaagcgcttctttgcatcagcagatgacgttccgagacaggcttatacgatggggatcggaaccattatgaaagcgaagaagatcctgatcattgtcagtggagaagataaggcagatatcgtaagagatgcatttttcggaccggttacgccacaggttccggcttcgattctgcagatgcacagtgatgtgacactggtagcagatgaagcggcactgtctaaaattccaagataaaaaagtattggtacatttatacgaaaatataaaaaaaatataaacaatattaccaaaatctaaatttgagacgtccggaaggttgacttgatgtgttgcctctggtatagtttatataacgaattgaatcaaattggattgttactgtcaggcaggcaaaaccagttttacaagagagtaataccataggtttattcttttgtgaaaactggtttttattatttacaagaaaacagggaactccaaaagaagactgatggtacgactgaaagatttgtataaaaaaggattcggtatagaatgttaattgacaaaattataaacaataatattgtgtcggcttctgacggcgaagggagagaggtcgttgtcatgggccgggggattggatttggtatgaagcccggcaaggagattccagagaataagattgaaaaaatctttcgaatcaaaagccgaacattggcagaacagtttaaggaccttctggcagatatgccaatggagcatgtgaaagtatccagcgatattattgcgtatgcaaaagaaaatttgaagttaaagttgaatcagagtatttatgtgacactgacagatcatattgattttgcgatcacaagatatcaggaagggatcaagccacagaatgcattgctttgggagatcaagaggttttactcgcgggaatatgaactggggatgtatgcgatcaagacgatcgaagaaaaactgcggatccggctgccggaagatgaagcaggatttattgcactacattttctgaacgcagaatatggaacagatatccgggatgcggcgaagtttccaaatctggtgaaaaagatcctggaaattgtggaaacccaattgcagatcacattagacgagacttctcttcattatgagcgatttgtcacgcatattaagtttttgcttcagcgtgtctatcgcaaagagcttcttccggatgaagagtcggaactggcagaactgatgcagaaaaaatatcaaaaagagtatgactgcagcaaacaggttgccgcatatattgaaaaagagacagattgcagcctgtccggagaagaggtcatgtatctggcaattcatatccgaagagtgacgactgcggaagaataaaggaggaaaaaagatgtttggactttttaaaaagaaaaaagacaagacacatgtattgggggcaccggcaaagggaaaagcggtttcgctgaaagaagtcagtgatccgaccttcagtgaagggattctgggagacggggttgcagtgattccgtctgaaggaaagatttatgctccggcagacggtaccatcggaatggtatttgatacccttcatgcaatcagcctgaccacagattttggagcagaggttctgatccatgtggggcttgatacggtacagttaaaaggagagggatttgaaggtcacgtaaaagccggagattccgtgaaaaaaggagatttgcttttgacagtagatcttgagaaggtgaaagctgcaggctacgatgtgatcacaccgatgctgatctgcaacacaaccgattacgcagcagtcacagcgttggcagacaaggaagtcaatgcaggggacgacgttttgacagtggaagaaaactaattcataaactatggttttaaaccggctgtacttgccggattaaaataaataaagggattccaataaggaaaaggattttgagaaggaggaaaagaaatgaaatttttacaaaaattaggtaaatccttaatgctcccagtagcatgtctgcctatctgtggtatcctgatgggacttggatactggatgtgtccggctacaatgcagggtggagaaattaacggtgtgattcagcagattggtttttatctggtaaaagcggggggagctttgatcgataatatggcaatcctgtttgcaatcggtatcggtgtaggtatgtctgatgataacgatggtacagctggtctgtccgcactggcttcctggctgatgatcacaaacctgctttctacagcaaatgtttctgttatcagaactctgtcagaaacttctacattagcattcgataaaattgcgaacccatttatcggtatcatcgcaggtctgatcggagctatgtgctacaacaaatttaaaaatacacagcttcctgactggctgtcattcttcagtggaaaacgttgtgttgcaatcgtagcgggtgttgtatcaatcctcgcatctgttgtattactgttcgtatggccagttatcttcggagcactgatcgctcttggagaagcaatcgtaagcctggatgcagttggagctggtatctacgcattcttcaacagactgctcattccatttggtctgcaccatgcactgaacaatgtattctggttcgatacaatcggacttggagatctgacacacttctgggctggtgagacatctgcagatgttacatggagccttggtatgtacatgtcaggattcttcccatgtatgatgtttggtattccaggtgctgcacttgctatggtacatacagcaaaacctgctaagaagaaagttgcaatcggtcttgttgcttctgcagcaatcgcagcattcgtatgtggtgttacagagccattcgagttcggattcatgttccttgctccagttctgtacgtaatctacgctttactgtatggtattttcgtaacaattacaacattggttggattccgcgcaggattcagcttctcagcaggtgcaacagacttgttgttctcagcatctctgccggctgctcagaaaacatggatgatcattcctcttggaatcgcagcatttatcgtattctacgtagtattccgtttcgcaatcgtgaagtttaacttaaagactccgggacgtgaggatgatgatgtagatgagacaacagtaaaacttgcaaacaataactttacagaagttgcacagatcgttctggaaggtgttggcggaaaagaaaacgtaacatcaattgacaactgcatcacaagacttcgtcttgaaatcaaagattacacaaaagtagatgagaagaaaatcaaatctgcaggtgttgcaggcgtgatccgtcctggaaaaacatctgtacaggtaatcatcggaacaaaagttcagtttgtagctgatgagttcaaaaaattgtgtaaataaaatcaaaatttaaatccctttactcataaggccgcttgcagcggcctttttgagtggatcaatgttactgttcacaccagatattaaataaaataaaaaagaggatagaaaacaatgctttctattatggaatgcatgtgatagaataacgaaatagaaagaaacgtattgcaggatctgttgtattcgaaaagcagcaggatacgtttaaaaaagcaacaaataatgagaggtagaccaaaatgaattacattttagagacatgtgcggacagtgtgcagtctgcaatagaagcaaaaaagggtggggcaaaccgaattgagctctgttccaatctggtgatcggggggacatctccgacggaatccctgttccgtcaggtgaaggaagagacaggtatgaatgtacgtgtgcttcttcgcccgagatttggggatttttgttatgatcagtatgaatttcgtacaattctggatgaggtaaagatgttcggcaggctgggggctgacggtgtggtgattggaatcctgaatccggatggaactttaaatatggagcagatgaagattctggtggaagaagcaggtgatatgggaattaccatgcaccgcgcctttgatgtttgccgggatccttatgaggcgatggagcagtgtgtttctctgggaattgatacgatccttacaagcggacagaaaagctctgcctgggaggggcgtgacctgatcgcggatctggtgaagaaaagtgcaggcaggatcgagattctggcgggagcaggtatcgatccggagagtatcgcaaaactggctccttacacaaatgcgaaggcataccatatgtcaggaaaagttgtgatcgacagccggatggaatttcgcagagagggagtgccgatggggattccgggattcagtgaatttgagatctggcagacttcggcagagaatgtccgtaaagcagtgcaggtattgcaggagctttagagttactgttcagaacctatatttaacatccggtgtgaacagtaacactttagaaaatctcaaatcagccttgacaaaccagtgggaatgggataagatttcgatagtatacccgtgtgggcatcccgtaatgcatgcctgcggcgggcggactctgtccgataaggtatatgaaacaggcaaagaagagaacaagtagtacaggaatggacgaagacagaaagcagccgggtgatgagaggcgcatgaggacatcttgtatgaatacatctcagagcttcacaccgaactcctgcaggaaagtaggctgtgacggattggtgcacgttatcgcactgagtgattgagcgttgaatggatgcgagattgactcacagaggcagagggcgcgagccgtctgtgaaaaaaggtggtaccacgagcttatgagccctcgtcctttcggatgaaggctctttttatattttaggaaagtgaggatgtatcaaatatgcagatttatgatgaattgaaagcaagaggtctgatcgcacaggtgacagacgaggagagaatctccaaactggttaatgaaggaaaggcaacattttatattggatttgatccgacagcggacagtcttcatgtaggacactttatggcactttgcttgatgaaacgtctgcaaatggcaggcaacaaaccgatcgctctgatcggaggaggaacaggatatatcggagacccgtctggaagaacagatatgcgttctatgatgacaccggagcagattcagcacaactgtgactgtttcaaagaacagatgagtaaatttattgatttctcagagggaaaagcattgatggtcaacaatgcagactggctgttagatcttaattatgtagagctgcttcgtgaagtaggagcgcacttcagtgtgaatcgtatgttgactgcagagtgttacaaacagagaatggagaaaggtttgagtttcctggagtttaactacatgatcatgcaggcgtatgacttctacgcattataccagaaatatggatgcaatctgcagtttggaggagatgatcagtggagtaatatgctggcaggaacagagctgatccgtcggaaactgggagaagatgcaagtgcaatgaccattacattgcttttgaattcggaaggaaagaaaatgggaaaaacacagtccggtgcagtgtggctggatccaaataagacttctccatttgatttctatcagtactggagaaatgtagcagatgcagatgttttgaaatgcatccgtatgcttaccttccttccattagaagaaattgataagatggattcctgggaaggggcacagctgaatacagccaaagagattctggcatttgaattgacaaaacttgtgcatggagaggaagaagcacagaaagcgcaggaaagtgccagagcactgttcagccagggaaatgcggcgcagatgccgacagcggaattgacagacgctgattttgaaggagatgagattgatattttgacattgctcttaaagagcggtctggttccatcaaaatcggaagcgagacgtgccgtacagcagggcggcgttgcagcagatggtgagaaagtagcggatattcatgctgtatttacaaaggacgcgctgtcaggagacggaattgttctgaaaaaaggaaagaaaaacttccgaaaggtagttgtaaaataaaattacggggatttccacgccggaaatccccgtttgcattaggagcattctttccaatattgtacactgcaggcaggaagcatcagtgaaccattgaaagtctgtacagaggcttccgggtcgttttgcagaagatcgacaaaggttcccatcagttctccgtgttggatcgtaaaatcactgtcagatgcgttgagtgcaacaagaatgcgttctttttctgtgcggcgttcaaagatcagctggtgatttgtaatggaaatattgcggtatccaccattgcataaagcatcgctgtgttgacgaagtatgatcagctgtcggataaaatcagtcagtgtattcggctctggcttttcgaagcatggacgaagtgcatagtcattatccggcgctttgacaccctcttctccccattcgcttccataatagatacagggaattcccggcataccaaataaaatgccgtaggcaagcggcaaatgggacgggtttgtcaaaatgctggcaattcgtgtcacatcatgattgtcgacaaagttcatcaaatgtttcccacgatagatgcaccattgttcaggtccgtactggcggttcagagaatgtgcgatttcaaacaggttcatgctgttcaggctggaatagattcctttgtagcattcataattggtgcagctgtgcagcatgtcatcattgacgatcagattgtaatcgccgaacaggacttctccgatgagtgcaaatccaggtttttgttcttcgcagaaagtgcggagttttcgcataaagttgtgatccagactatatgccacatccagacgaagcccgtcaatatcaaaggtgtcgatccaaaagcggacacaatccagaagataatccgtgacagccggattttgaaggttgagttttaccagttcgaagtgaccttcccatccttcataccagaatccatcctgataacagctgtctccgtcaaaatggatgtaaaaccagtctttatatggagagtcccatttcttttccagaacgtcctgaaatgcccagaatccacgtcctacatggttaaagacaccatccagtataattttaatgtgatgctggtgaaggtcagcgcaaacatcctgaaaatcttcatttgttccaagacggcagtcgatctttttgaagtcgcgcgtatcatatccgtggttgtcagaatcaaaaatgggattcaggataaccgaaccaatatggagattctccaggtattcactccagtcttttaattttaggatacgcggcatacagattccatcgttgtgagtcggggcaccgcagaatccgatggggtagatttgataaaaagtttcgttgtaagcccacataataagtacctctgctttcttcataagataggaatattataacgtattttcaatgatttcgtaaggtttacaaaggctgtaaaaaaaattgaaaaaatttaaaatttattgttgacaacttgggtacacttatgtataatagctattgtgtcacggagaaaacgacacggaagcaaataacggggtgtggctcagcttggctagagcgcctggtttgggaccaggaggtcgcaggttcgaatcctgtcaccccgactttgcgggtgtagttcaatggtagaacaccagccttccaagctggatacgtgggttcgattcccatcacccgctttcttgcagaatattctgcaaggagcctataaacggggataaagtttatacgagtctgtagctcagctggatagagcaacggccttctaagccgtaggtcgagggttcgaatccccccaggctcggtatggtgggtatggtgcagttggttagcgcgccagattgtggttctggatatcatgggttcgagtcccattacccacccttttcttttataagaagcactagctaagcagtgtcatagttgagtttactaatgggctatcgccaagcggtaaggcacaggactttgactcctgcattcgctggttcgaatccagctagcccagtttacctggatagtgggtatcataagagaatatgggcgtgtagctcaggtggtagagcacttgacttttaatcaagttgtccggggttcgaatccccgcacgctcattgtagaacaagcagttgtgcttgttttattttttctaaaattgcatatgcggatgtggcggaattggcagacgcgctggttttagggtccagtgggcatcccgtgcaggttcaagtcctgtcatccgcagtttatgaacgagccttgattttcagggctttttttcatgcagttttgtgcagatgtgcaaagaacaggagtctgcagttttgtgcgggaacatcatttaatgatttctgagaatatcaagcacttcgttatagcgtgacttgccaattggtacttctgttttatcggcaagcgtgacatgataacgttttatttctgttacatagaatggatttacaagccagcttttatgtgtttgtacaagaaaaggcatcaattccaacaactgcgacaaactcttatatgttttaaatgtcattgaagtggtacaaattgtggcaattcgataggaaattgaaatatagagtatttctgccgggagtaagtagtgcattccaccattcaaatcttttagaagaaagtgtgaatcgctttctgaacatcctttttctgcggagagcatataatcataccagctgaggattggctgctgcgtgatacctgtattcacagttccttccaacggaatatctcttgccatcgtgcagtgaaggtgaagaagtttgaattcttttcctatgtatttccagacataagtggctctttgtttggtatatagaaaggtggattcatctttccaggcagaagcgcggaaacaaccatagacaatccatgtattcgcatcatgggataaaatgtgatattcttcattgtatacttttgcggagcgttcgttttgctcttctttggtgatttttaaaaattcttcgattcctttggtgaattgaaattcataagacccaatccacacaaaatctttatcaagcagtgagacgaatgtgtccatatctcgattgaaataggagtgaaaaacgagactgcattgttggattaaggatctttcttgtgtcgttgctttttcattcatgagaactcccccttttcgttttattatattataaaataaattcctgtaaagtcctgttttttcctgttgaggacttttttattgaaattaaaaaattaggatgctatatttattctgctttattagggaatactgcctttaaatgtaagaattctatgtattggagtattacctggattcaagtatatttttatatgcttttgaagaattatttcagggggaaggagaaatggatatgagaatgaggaatatgtcaaaacgatttttgacaatcacattggcggcgtcgttggtggtaagcaatgttccattacaggtaaatgcagcagacgtagtttcggatgaaaatattgcggaaaatactgtggatgcgtctgtggaagcagaaactggaatagttgaagaaaatgacaatagtgatcagattgcagaaacgccgttaactgaagaaaatgatgcgacacagcaaactgaggaagtaccggaagcagaggaagtaccggcagcggaagaagtacaggtaccggtgacagaagaaacaccggcggcagaaacaagtgaagtacagcagaatccagaaacaacggtatcgaaacaggcagaacaagaagaaaaggatgctgtggaaattgttttaaagacagacgaagagaacaaagttgtgacgaagctggaagaagttgaagaacagctgaatcaggcatttggagagacattacaggcagaagggatcacagtaaatgattggaatattttttcgaaaaatattgcaaatagatgggttcctcttgcaggtgaaaagtatgggcttacatcctttaagggaattctggaacaagagagcggaacatatcgggtaggagtgaaccgctattttgggaaattggattttgcaaaaacaaaccctatggtaaaaaaagagtttacaattacgataacccgtaaacaggcctatgaaactcgtgatctggagctggaactgggaggaaatggaacggtaaaagcaggaacagatacattgggatcaggatccaatgaaatttcccaaaatgcggtgtctttgcagtttgtaccagaggatggtcagtatgtcaaagcagttgcattgaatggaaaagacattacgaatgaaatccagtttaaagagtgtattggtacatatcagcttgcagcaggtgaagatgcagcatctttaagagtcgaatttgcagaagcaggattgaaggcgaaagatatcgtagaagatgttgaattgtttttgaacgaggatggaagtattgattatgatcatgtgcggcagaacattatcgggaaagtactcaattcggaaacatctgttccggtaaatccggaaggactgactgtgcaatataatggttcgaaagtaaatttcctgcctgtttgggttgatttaaatgaagacagtattttatatgatccgtttggactgggaaaacaggagattaagatttcttatccaggcaatgacagatatccggcttctgagattgtaaaagaaattgttgttaaggaagctggggaagagactcagatgacactgacggagggctgtacggttacatttgcaccagaagaagaaatgaaacaggcgctttataatgcggtacttccacaagtgcagacaacagaaggaaatctggttgctacaacgattgatgattttgagatttctttcgaaaatacgacaggtgatgtagaagttactttccgatataaaggaaaagtgaatgaatacaaaagctgcgaaggaaaagttctggtacatgtgaagaagggaaaagtcagcgtttctgtagattgccaaaacattacgtatggtgaaaacttcacagatccaatcgtatcaacgagcccggcaggtgtcgattatctgacaattattggtggtgttgacggggatgcggaaggatttatcagtatcaaactgccacagagtataaaagatgttggaagcattggcggtatcaatatttacaatgaaattgttaaaatgtttgataaaggaattgatctgaatgctttgccgcaggtgatcgataaaattaatgacctgcttgaacttcttgataagattccaaacgctccggagctggaaattgattttgatgcaattcagaagattttagagtatttaccggataatatcaatgccaaagtatatttggaaaagaatccgtctgaagcaggaatctatgcagtaggtgctgtcacaacagaccagaattacacaacaggtgtaggggttggatttctgacgatcgctccacaaacagcaaatgtaaaacttacattcaatcaggaacttccggaaggaaatcggattccgatgggacaagttgacgattttgtatttggcgggaaacttgttgatgcagaaggtgcagatttaagtggaaacgttcacacattgtatgcagggacatctatcgatggaaaatttcatacaaatacggaaccaatcaaagaagagggaatatatacagaaacagtttatatttcgggcggaaattattttgcacttccaatcgtaagaacttatatcgttggaaaagaaccaacaagtgttaagtttgatcaaaatctgaagttagaacagtacaacggaaatccaattggaattacagcaggtgtttatgacagcaacggaaatcggattgctgatgcgactctgaaatatacaggaattgattttggaggagatgaatatcaaagtggagaagctccgataaacgccggtgtttaccaggttacggctttctatgacggaaatgagacatatcaggcttctgtaccaaatattgtaggtttggtaacgatcacaaaggctggtacagcaacgataaaaattgatgatattacaacagatgagggtatagagccagatctcagcaatcattcttatcagcgcaatggttttgtaggagataatgataacaatcgaggggatcttttgacagaaataaaatgcaaagaaggatctgatcttacaaaagaccatgaaattgttggtgtagtaaacagtgatgttgctaagaattatcagatggtaagggtagaaccaggaatccaccatattgcagcgaagacaagggttcatgtgactctatattcgaattcaacttctggaacattcgcagacggatcagacattttgaattatgactttacagaagacgaaccggttttgaatttgccggaggtgaaagccaaggaaggctgggagtttataggatggacagttgccggtcagaatccacaggtaatagataaagctgtaaaatctatcaatgtgatggattatgcagactttacatatgataacaagaacggaacattatcaatttttgctgcctataaacaggcagagaaaacagttaatgtatatttttctttgaataaagatatgggtgagttcgaaggaaatacagaagcagaaagcttatcttatgagaatcttacagaaaacaagattgcacttccaaaggtgaatgtcaaagaaggctatgtatttacaggctggaaaggatatggcaaagaagagattgtacttggagaagaagcagttgagcttgagaatctaaaagatattgcgaattttgatagtggctttagtaagggagtaatttctctggaagcacaatttgcaaaagaagtgacaccgatcaaaaaatttgttacagcaaacttcaacactggagataacggtgcatttgaagatggaagtaatacacagtctacaacaatacttgaggatgaaagctgtcagattccgtcagtaaaagccaaagaaggttatgcatttacaggttggaaagtagaaggaaaagaaaccacaacatttgaagcagataaggctgaatttgtaccgggagaatttgcgttcttctatcatggcgcaggtaatgttacattgacagcacaatatgaagcagtaccgactgaagaaaagacagttaatgtatatttcaacgtagatccggagaaaggctgctttacagaaccggcaggagcagaagtcgtaagttttgaaaatattgcagcagattctgcagaacagttcttagtaccgaaagtagcagctaaagagggatatgtattcaaaggctggaaaggtcagggagcagagacaattgaatgggatgcaaatgtatcaacgtttggagtaacgggtcttgctcattttgcagaaggttctaatgttggatatgcaacaatcgaagcagtatttgaagaagcaccggctgaaatatatccggcatcagcagatatcgtaactgatcttgaaaaaggttattttgaaggctgggaaggtgtagaagttctggaaaatgaaaacttacaggaaagtgactatacgttgggcttccttccagaagtaaaagcgaatgatggttacaaatttacaggctggaaagtgacaaatgaagcaggttctaatatctatgaactggatacgtcagcaacttctattgtattcccatatggtgttggtgatcactatattgtaagagcaatattcgaagaagttgtaccggagacgccggaaacaccggaaacaccggaaacaccggaaataccggagacgccggaaacaccggagacgccggaaataccggagacgccggaaacaccggagacaccggaaacatcggagacaccggaaacattagagacaccggaaacttcacataaagcaccagagtcaaaatcagcagaagcagaacagaaaaatacggttaagacgggtgatactgcaaatatagcaggactaatccttgtattattatgttctattgcggtgattttcggtattgtatttaaaaagaagcatcaaaaagagtaatagaaaaaactgtcaacagacatacgattctgttggcagtttttttgacagtgttattttctgtatgcaaattttggaacgccgttttcggttggaacagtcacttcaccttgtatcagtggacgtgcgtagcggatgaaatcatcggttacatcagaaccgtcttctgtgatccatgcagcaggaacgcatttctcctgattacagatgatgttcacatcttttagtacatagtcaatctgataagcatctccttccagacgttcaaaggcgaccatatttccacttgctccgtttaaggccgcttttacaccgtaagcgccggcagcaatggcttctttctggtctgtcttggaaagcatggaagaagagcatctctggcacacattgagttctacagagcgaactttgacaccgagacgttcttttacgaggttctccagatattttccggaaccagtcagcattttgtgtccgaatgtatctgtgccgacatcattggaatactcgcagataaaagttccggtgctgtcatggattccttcagaaatacacactaccagatttggcgtgttctccagagataaccggactttttcgataaaggcatcctgatcaaagtctgtttccggaagataaatcagaatgggattgtcatgttcaaattttcttgccagtgcgctggcagcagtgagccatccggcatgccgtcccatgatctcgacgatcgtaaccgattttttgttgtcataaacagaagcatcgacggcaatctcacgaacggtagaggcaacatattttgcagcgcttccaaatcccggagtgtgatctgtctcaacgagatcattgtcgatggtctttggaattccgatgacacggatatcgctgcagatcttctcggcatagcgggaaagtttgctgacagtgtccatagagtcattgcctccgatgtaaaagaaatatccgatattgtatgtttcaaagcgttcgaaaagttttggatagaccggatcacttaaatcttctggaagcttatatcggcaggagccaagataagagccgggtgtggtacggatcagatccagttcaccggattcttccagaggagccatatccatgacctggtcatttaaaaatccctcaattccgtttatcattccgtaaacagtgccaatctcatcttcgcggtttaaagcttcatatacggttccataaagactcgcattgataacggcagtaggtccgccggattgtcctacaactgcatttttcttcatagtgttcctcccatttacttttttataaaaataagtgttctctataatactataaaggaaggaactgtattttacaataaaatggttggaaaaatagcaaaagtacagtataattgctatattgaagaaaaggagtgtagacatgaaatatatatcttttgcaattccatgttataattcagaagcatacatggaaaaagcaattcagtcaattttgcctggaggagaagatgtggagattatcgtagtcaatgatggatcttcagacagaacaagtgaaattgccagacagtatgaagaaaaatatccgggtatcgtaaaagctgtagataaagaaaacggcggacatggggatgcagtcaatacaggtttggcacatgcttcgggtgtttattttaaggtggtagacagtgacgactgggtagatgaagaggctcttcagaagatattgagtgcagtgaagggattcgtagaagcgaagtccaaagtggatatgttgatttcgaattatgtatatgaaaaagtcgggatgacacataaaaaagtaatccattatcgtaatgtactgccgcagaatcagattttccggtgggatgatattggaagctttcatttggatcagtacattttgatgcattctgtaatttatcggacagagatgttgaagctctgtcagctgaagctgccgaagcatactttttatgtggacaatatttatgtgtactatccactcccgcatgtacggacgttgtattatatggatgtggatttttaccgttattttatcggacgggaagatcagtcggtcaatgagaaagtgatgatcagccggatcgatcagcagatttatgtgacgaagtctatgatttctatgtatgaacttcgaatgatagaaagcaaaaagctcaggaaatatatgatcaattatcttgcgatcatgatgacagtatcttcgattttgtgtattcgttcaaaagtgaatgagaatttaatcaaaaagaaagaactgtggacatatttgaagaaaaaggattatcggacgtatgtaaagatccggtatggaattctcggtcagacgatgaatctgccaggaaaatccggaagaaaggtttcttcaatggcatatagtgtggcaagaagactgatcggatttaattgattttgtaaaatttaaaaagcagaagcatattttgccagccatgaaacatactacttttatgaaatgtaaaaaggagtgtgtatcatgactggtaatttttttgaaagtgaaacaaaggaaaacttaatgagagcatttgcaggagagagtcaggcgagaaaccgatatacaattgctgctgaaaaagcccgggagaagggaatgtatacaattgcagatatatttttgtatacagcagagcaggaacgggcacatgcagagaggttttatgagcttctgaaagaatttacaggcagtacgatccagattgacgggacatatccggtagatcagcaggagacgcttgaaggtttgctgcgtgcggcagagcacaatgaaaaagaggagtttgaagatgtctatccatcctttgggaatacagcaaaagcagagggatttttagaggcagcatctgcttttttccagattgcagaaatcgaacatacccatcaggaacggtttcgtaaagtggcagaaatgctggaaaatagtacgtattacaatcgagaggagccgggacgatggatctgtacaaattgcggatacattcatgatggaaagcaggcgcctgcaatctgtccggtctgccgtcatgagaaagggtattttctcccatatgaatatgcaccttataaaggagcgggaaaatagatgagtcaaaaagcagaaaaccttttgaatcttgcgctggatgccacgaaggaagagcgtgaaaaatcattggagctggaggttggatatcagccggcggatcaggagtgggatctgatcatcaaatattcaggaaatttgggggcggttcgagaaatcgcctcctctgttacagaattgtccaatgaatatgcaatcctgacggtatcggaatcccgaatagagcaattggcacagattccggagattgaatatattgagaagccgaaacgtctgtttttcgaggtggccaatggaaagagagtttcctgcattcttccagtacaaacagcacctctgaatctgtatggggcaggcattcttacggcagtgatcgacagtgggattgattattctcatccggattttcggaatccagatggaacgacccggatccgtgcattgtgggatcagagtatttcgggcaatcctccaggaggatattttctgggaacggaatatacacaggaacagatcaatgcagctctgtcagagccggtaaaagccagacaggagcagatcgtaccaagccgggatgtatccgggcatggaacatctgttgcagggattgcggcaggaaatggaagaggcagtgtgggtggcatttatatgggagtggcgccccaaagcgagcttctgattgtgaaactgggaaatccgagacagggagggtttcctcgaacaacggagctgatgcagggggtagactatgttctgcgaaaatcgttggaatatcgaatgccggtggcgatcaatatcagttttggaaatacatatggctcccatgagggaacatcacttctggaacggtatttggatgatatggcgaattactggaaaagtgtcatctgtgtaggcagtggcaatgaaggaacggcagcagggcatacatccggtgtactaaaagaagggcaggagcaaagagttgaactgggtgtgcagcagagagaacctgctctgaatgtacagctctggaaatcttatgtggacgaagtggatatttctgtgatcgctccatcaggaattcgcgtgggaccaatttcagaaaggcttggaacgcagagatttcgaatcgggggaacagaaatcctgctttactatggcaaaccaagtccatatcagaccaatcaggagatttattttgatttcatcccaacgggttcttatattgacagtggagtctggcagattgtattgactccgagaaaagttgtgacgggaatttatcagatgtggcttccgagtgagcgcattttgaatcggggtacggcgtttttgaatccagtcagcagtgatacgcttacgattccatcgacagcatccagagtgatcacggtaggagcatatgacgcaagaaatttttcttatgcagatttttccggtcgcggagcattggagaaaaattcggagatgtgggttcagaagccggatcttgcagcgcccggtgtgggggtgatgacagccaaaacaggtggaggatatggtgaatatacaggtacttcttttgcggtgccatttgtgacaggaagtgcggctcttttgatggaatgggggattgtaagagggaacgatccatatctttatggggagaaggtaaaagcatatctgcgaagaggagcaaagcatctgccggggtatgaaagatggccgaataatcaactggggtatggggcgctgtgtgtgagggatagtttgccagagcaaaaaacaaatatacaaatattgtagttataagaaaagtatgttacgatatattatacacaatgtgtaaaagttaaaggggagagaatatggaaataaaagataaagtaaaagaattacgggaaagtacgggaatgaatagaaaagaattttgcgagtattttggtattccttatagaactgtgacagaatgggaaagaggaacaagaaaaatgccagattatgttttcagactgttaacttacaggataaaaatgggtaatttcacagaaaatggaaaggcagaagagaatgaagaataaaataattgaagtacaaaatatatcagtttcgattttaaaagaagagttggatgattatatttgcattacagatattgcgaaagcaaaatcaggagaattgcgtagtgcagatgttattaaaaactggttgcgaaatagaaatacgttagaatttttaggaacgtgggaattaatttataaccctgattttaaagtggtcgaattcgaccactttaaatccgaagcaggtttgcatacctttgtattaagtaccgcagagtggattaataaaacaaacgctataggattatatgtaaagcgtggaaaatatggcggtacatatgctcataaagatattgcttttgaatttgcatctgcaattagtccagtatttaaattatatctgataaaggaattccaacgcttgaaggaagaagaaaataaatcaagacagatagaatggaatgcgaaacgtttccttagtaaaaataattatctgattcagacagatgcagtaaaagtatcgtcaacacattgacaaacatcgatgtatatgatataaaatacatagataaatatctatgtgaggtaattgatatgaaaacgatggatgtagctcttatttgtaaagcacttggagatgccaatcggcttgagattgtgaagatgctttctgatggagaaaaatgcggatgtaaacttttggaaaagtttgagattacacagcccacactgtctcaccatatgaaaattctggttgaatgtggtcttgtaaacgatcgaaaagaaggaaaatggcatcactattctttgagttgtgaaacattaaatgcatttcaagcatttatggattctttaacatgtgttcgggtgtctgattgtaaaggaggagattgcgaatgtccggtgactttataatagatcagatactcggtatgaaatggctgaaccaatggatcggccatgcgttaaatgcggtcggaattagcatagaagggaaaataggtggaagtctgcagttctttttgtatgatgtggttaagattaccattttactttgcgtactgatatacctgatttcttatattcaaagttattttccaccggagagaagcaaaaaaattatgggaaagttccacggaatatgggccaatattatggccgcactgttgggtacggttacaccgttttgcagttgttcgtccattccattatttattggatttacaagtgcgggattgcccctgggtgtaacattttcatttttgatttcatcaccaatggtggatcttggaagtcttgttcttttgatgagcatatttggtgttaaggttgcagtgctctatgtggtacttggacttgtgattgcagtggtcggtgggactttgattgaaaaacttcatatggaaaatcaagtagaagagtttattcttaaggcaagtacagttgatatagattctccgacattcagtcaaaaggaacggctgatctatgcgaaagaccaggttgtggggactttcaggaaagtatttccgtatattctaattggtgtaggtattggagcgattattcacaactggattccggaaagctgggtagtgagtgttttgggaaagaggaatccttttggtgtaatatttgcaacggtgatcggaattccaatgtatgccgatatctttggaacgattccaattgctgaggcactgcttgcaaaaggtgcacagttgggaacggtacttgcatttatgatgggggttaccacattgtcgctgccgtcaatgattatgttgaagaaggcgatcaagatcaagttattaggagtatttactgcaatttgtgcgatcggaattatggttgttggttatttattcaatttatttcagggaattattatttaggaggacaggaaaatggcattatttgaatttggaaaggaagaacaaggggtaaaagttcttggaggaggatgtaaaaaatgtgatcagctcgaatctgctgcaattgaagcattggaatcacttggaatggatacgtcaattgaacatgtaagagattttgaaaaaattgcggcatatggagtgatgacaacaccggcattggtaattgatggaaaagttgtttcttatggaagagttcttaaaaaagatgaaattgtaaaaatccttaaggaagtgagagaataatgaaaaaggtagcatttatttgtgttcataattcatgtcgaagtcagattgcagaagctcttggaaagcatttggcttcggatgtgtttgaaagttattccgccggaacagagacaaaaccacaaattaatcaggacgcagtccgcattctgaaagagttatatggaattgatatggaacagacgcagtattccaaacggataacagagattccggatccggatctggcaatttcaatggggtgtaatgttggatgtccttttattggaagggagtttgacgataattggggattggaagatcctactggaaaatcagatgaagaatttaagagagtcatcaaggaaattgaaaatagaattttgaagttaaagaatgaagcaggaaatcacaaatgatctcctgctttttggcaaacatgcatttctcttagacaagttctaacattcgaatcgaatactcataagaaaacaatttatcagggttattgatatcaagatgaaacaactgattcattttgtcaaaccgataaaacagggttgacttatgaataaacagagcttttgcagtggcaggcatactgcggttgttttgaaaataagtctttaatgtattgagatattcagttccctgctcttcatcgtatctgatcatatcgttgatcgcaggatggatggaagctctgacagaagaaggttgtccggtcagatttatcaggtgtttcagataataatcttcataaaacacaacggaattttcattgtatgatacgatgcggtcagaaagaagactgtggcattgtttcgcatagatggaagcattgtacagctggtcaaaacaataactgatcgcagataacatgtgattcattgtcaaaaacgtttccagacgagagtgaatccggtcaaaaaaggcttctttgtctgaaatagaaacaagagtgataaaccgattcccaaacgagccggtaatgctgtttttaaaaatagaagaaaactgttctcgatagtaaggagtcgccataatcttggaggaaccggtcgtaaaaccagtggcaatcagaaaaaagtactgctttggttccattcccagataggacaggtgctttcttgccatttcttccccgtcaaactgcttcgcaaacaaatcttttaagaacatatcatatttaatcccggagggattgctgtatttatcatctttttgtaattggatcgagatcatttgtgtcaggcaatgaatgatttccagatctctttcttcgtattttttctccatacaacgaacgcaaatatagccaaccaccgcgcgtttgatgcgaatgctctcaaaaatgatcggaaaatccatatattttacatttgtgacaaaaggaaaaacagagtgataaatccgctcagtcgtctgagactctttcatgttgtctgtaaaaatagatttgatggaaaggcggttgttgcggacttccaggcattcatcatctgaaactttaggaaatgatccgatcacgctgtaagagctgtcacagacaacgatggggtttctgattattttataagcgctctccagaagtcccggaagcccctgtccattgtataatgcgtgaaacagtgcagatttattgatttcaatctgacggtaagtctgcagggaaaattctatcacattgtgaagatcataaagatctaaggattcagaaatatataacaggttgccttctggaatttcttccccacatccgacaaagagaatatcaccgaccagatcccgggagtcgatcttagaaaaatctgccaaataaagaatatttggatacagataagatacatggaggtcatgctggtcgagaaagcgaattccgtcgataatctgtctgatatgatagttcccttttatttttacagagtaatgctgttcaatatcttgaatgatcgttgataaatatgccatggtgctttccttccttcttttatcttctaaggtttagtatatcagacatttgtcggaaaaaaagagcttttctgatatattttcttcaattgtcgtgcgatgtcggttctatccaatcatgttattattttatcaagcgaaaagaactgccagttcatgatgaattttaaggaggacgattatgagtatcaaggttatgggagtgactgctggaagaaagaacagcaacagtgaaattttgctgaaggaagcactgatcgcatgcgaagaagcgggtgcagaggtgacaatgatcaatttgagagattttaatattctggattgtacgggatgtacatcctgtacgatcggaatgtcacaggggaaaaacgtaggatgtgtgcttgatgaaaaagatgacaaaaagaagatcatggatgtgttattagagcaggatgcggtgatctattctgttccgacatatgatctaatgccgtctgcaaattatcttgcattcgcacagagaagtttgagctatgaaacagcatttttagaaacaatcggggcaattgagcataaagatcgtgttgcgggtctgatttctgtaggtggatctacacgttcctggcagtcaatggctctggaaggattacaggcaaccatgtttacaacagatatgaaggttgtagatatgattctggccgcaagagtaccgggacctgcacagtgtctgttagacgatgatctgatcgcacgtgcgcataagatgggagagaatattatgcaggctgtcaaaacaccggtttctgaccgtaaatggttgggagatgaggatatgggatggtgtccgaactgtcactcgaatgcacttgtattaggggaaaaacagtgggatggaattcactatccaattgaatgtcaggtttgtggtgccggcggtactctggaaaagacagaagatggaaaatggaaattcgtcattcaggaagatggattatacaaagaccggacaacggtagagggacgtgcaagacatctggaagaaatcggagaaacacagggaggattctttggaaatccggcaaacagagaaattgttgcaaagaagatcgttcgttataaagaaaagcaattcaaaggaattgaataattggggggattttggtatgaaaaagagttttaaataccgtgcagttaatgcattgatcatgaatattccagttgcagcagcgatttcactgacggcacagctgctggcggttcacacggtgattccgaaattgtttgtcatcaatttttgcattgcatatgtaatttcctttgtaatcggtgtcagtattccgctggttccatgggggatcgcatttgcaaaaaaatgtcatacaaagccagagtccttaccgtttggcctgtgcatcaatgtagtggtgaatcttgggtatgtgctgatcaattgcctgatccttacatattttaacgtatgtatgttaggacatgcaccgattcaggcttactttattggtatggcaacgacatttcttccaatttacgctgtcggatatatcgtatcttttttatggaatcgtccggcagaagctcttacgaaaaaaatatgtaatgaataacaggaggcatttattatgaaacagttacagacagatgtgatcgtagtagctgctggattatcaggtcttgcagcaagtattgcagcggcagaaaacggagcagaagtccttgcatttgagaaatctacaacaacaggaggagcggcaaacatggggatgggacctctgggagtcggttccagaatccagaaggatcatatgatcgcgctgacaccgggtgaagcattccgaaaacatatgtactttactcattatcgtgtagacgcaagaatggtcagagattattacttcaaatccggtgatacgattgactggctgatggatatgggcgttgagtttgtaggcgttcagagagcattcagcgcaccggaagctacaagagcatattcggacggtgagtttacatggcatgttgtaaaaccagaaggaggcggaatgccaggaccacgctgtgcaactgctatgacaaagaaaatgacagaacgtgcaaaagaattgggagttcagtttttatttgaaacacctgtaaagaaaatcatcatggaagacggggcagcggtaggagtgcttgctgtagataaaaacggagaagagattgaagcaagagcaaaatcagtcattatctgtaccggtggttttggagacaatccggaaatgatcaaagaagagacagaatttgaatatgccaagacgatttataactttgcaattcccgggatgaaaggggacggcatcaagatggcatgggaagcaggtgccggaaaagagccatgtatcatggaattgatgtatcagcttccggataacatgaatcatttcattctggacggtgcattccgccagccatgtctttgggtaaacagaaatggtcagagatttatgccggaagaccagattgcaaacacaacatttacaggaaatgcgattgcagcacagccgggaaaagtggcatatgcgattttcgacagcaagatgctgaaaaaatacaaaaagaaaggaccggacatcgtatctcatgtacatccacacgatctgtttgatcattttgatgaacagtgggaaagagatcttgcggacggatatgagccgatcgcacaggcagacacgattgaagaactggctgaaaagatcggaattgatgtagagggtcttacagaacagattgaagaatataacgaaatgtgtgagaacggatatgatgagatctttgaaaaagatcgtgtatacatgcagccgatcgcaaaagcgccattttatgtatgcagacagaatgtaggggcatatggatctcttggaggagtcaagatcaatcataagacacaggtattaacgcaggaggcaaaagtaattcctggattgtactgtgcaggaacagatgcatgcaacatttttggagacagttatccatttattctttcaggaaatacaatgggattctgtttgaacagcggccgtattgcgggtgaaaatgcagcagcagaattagatgattttgacgaatacggattttaagaaagacagatccgatcatagagtttagaggagatcatttatgagaattacaattgacggaaaagaaattcaggcaaaagaaggcagctcggtattggatgcagctttggcagccggtatctttattccgcatctttgtagtcatcctgatctggaagcaaaaggaggatgccggctctgttccgttgagattgacggaacagaaggggcagttcctgcctgtaaaacaattgcagaggaagggatgaacattacaacaaatggtgcggaagctcaaaaagttcggaaaaccgcaatggaactgattttggcaacacatccggcggattgtaccggatgtccgaagtttggcaaatgtgagctgcagtcgatgtatcagtacatgggcgtcagtccggaacgttggagaaagaaatccagaagtgtgccaaatgatgacagcaatccgctgatctcgcatttatttacaagatgtgtaagatgtggaagatgtattcgggcatgtcaggagctgcgtggagtaaaagtgttggattatgtgaaaacaaataccggcatccgtgcgggaattccagatggaaaaacactggaagaggcaggatgtcggttctgtggtgcatgtattgaggtttgtccgacaggctccattatggatgcggttaagatcatgaagcctgaaagatcgtatgaagaaaatgtggttccgtgcagaagtacctgtccggcacacattgatattcctgcgtatattcgatgcatcaaagagggagactttgacaaggctgcagcgatcattcgtgagaaagttccatttccggaagtacttggtgcagtatgcacgcacaattgtgaaagcagttgtaaaagaggagaacttggtgatgcggtttccatctgtaagttaaaacgggcagcggcagcagaagaatccggggcatggaaagaacgtgcgagaaaagagaagccgacaggaaagaaggcggcggtgatcggtgcaggagtggcaggtttgacaacggcttattatcttgcgaaaaagggacatgaagtgactgtatttgagaagaatgaaaaggcaggaggacaatgccgatatggaattcctgcatatagacttccagatgatctgttagaccgtgagatcacagcgattcttgaaacaggaatcgatctgcagaccaataccgtatgtgaatctccgcaagaactgttgaaatcagggtatgatgctgtgctggtatctgttggaacgcatcagggaagtaaacttccaatcgaaggaaatgacctggaaggcgtttatgtaaatgcagaatttttaaaggctgcaagaagtgaaacccctcttttaccgggggaaaaagtgatggttcttggtggcggaaatgtggcatatgactgtgcacgtacagcagtcagactgggagcaaaagaagtccatatcgcatgtcttgaaaatgagcagcagatgacctcttctccggaagaaatcagagaaggggcagaagaaggaatcatccttcatgcaggctattccttccttcgaattacaggagatacaaaggtatccggtgtggagctaaagaaagtaaagcaattctattttgatgaaaacagaaaaccggttctggaactggaagaagggtctcagcagatcattgatgtggatcatgtcatttttgctgtgggacagaaaccggaaggcacagaaaatatgggactccaattgtgtcatggtccatatattgagacaaaagattcggctacaagtatgaaaggagtgtttgcggcaggagatgttgtcacaggaacaaaatccgtgatcgaagcaattgtcggaggaagaaatgcagcgatggaaatggataaatatctgggtggtgacggagacattaccgaagtgctggcagaccgggaaaaaccagatccatatctgggacgtgtggaaggatttgcagatctgcagcgcatagagccggaaatattgtctgctaaagagagaatcggtggatttgcaccgatcgaaaaacctctgagctgtgaccaggcgcagtgcgaagccggaagatgtctgcagtgtgatctgagaacaacgcttaccaagacaaaactttggaatgaatattaggaggacacagatgaatagcattgagaaaatcagagcattaaaagaagatcagtgtgttgttgatgtccttttaaaagaaattatggcacatccatgtaaggattgtggaaagtgcgtatttggatatgaaggcattacacagctggaaatgattttaaaagatatcacagagaaaaagggaaacacatcggataaagcactgatggaagaactgtgcggattgatgaaaacgcagtcactctgtgaggaaggcatggaaattgcggacacggtgaaagaagcgttaggtacatatggagagattttcgaggaacatattgcgaagaaaacgtgtcgtgcaggagtatgcaaaaagtttatgacctatcatatcctggcaaaccagtgtattggatgcggcgaatgtgcagacgtatgcgaagatgatgcgatcattggaaagaataaattcgttcacattatcgatcaggacgaatgtacactgtgcggcaaatgtctggacagctgtgaggaaggcgcgatcattcaggcgggagctgtgaaaccgcgctgtccaaagaagccgattccatgcaaaaaacgataggacagaaacttccggaaaggggaatgatcatgaataaattaggaaaatatcagaggagtgtatcgattattggcgtaggatgcacaccatttatgtatacggtagatcatgaagaaaccaatggtctgacagaaggcgaattatttggatatgctgcattaaaggcaatggaagatgcaggggtgaacccgcaggatgtagatttttattttcatggatgtgccagtccgctgaatggatccaattatctgacaccaaatgtgcagatcgcaaactggtttggaatgaaaggaaaagggtcgattcatcattcagaggcctgctgtacaggatatctggcaattgaacaggctgtaaatgcagttgcatccggaaaatatgactgtgtgctaagcggtgctgttgaatttggtgacagtacgccaagtccggctgataatgttgaaactccaaagcatccgtacaaacgtgacaagatgacaatggaaaaatttttgaaaacaacctcctggttatatgaccgtacctataccagaagcctgatggcaggtcaggaactgatctatgatgatgcagcggaatggtatgtgcgtacgagaggaatctcagcagaagatatgaacaacaccttaaatgcaatgtgcatcaacaacagaagaaatgcttcgatgaatccgcttgcgattgaaagaacaacgtatgaagagcttgcaaaggaagcaggtatgacactggatgaatatatgaattctccatacaacccgaaaatgggggatttccttcgtgcgggcggtctggaattaaaatgtgatggagcggcggctgtcattgtatgcgccacagaaaaaattccggagattgcaaaaaatctcaaacataaaccgatcgaagtactgggaatcggcagcgctgcctgtgaagcaaccactccgcattttgaagttcgtgcaacagaagaggctgttcgtcaggtatatgaactgaccggattatcgggagaagatctggatctgttctttgcaaatgactttatcattacttcccatctggtatccgctgaaattgcaggatatctgccatacggggaaggctggaaatacatctgcgatggacgcactgcatgggatggagataaaccgatcaattcaaacggaggaagaacatcgtttggacatgcccatgctgcatccggtctggcagatatgtatgaggcctgcaagcagatgtggggcgaatgtggagaacgccaggtgaagaagttaccaaagacaacgatgcttcgaggatatggcggagcacagaatgtagcagcgatcatcgtgcgtacaatggactgataaaggagggagtaccatggctatcaagttggagaaggtcgtagaaaaattttatctgggattggaagagggaaaaattttaggacggaaatgtccggagtgcggaaatgtagaattcccaccggtatatgcgtgcaatgcctgtggaagttatgaaacagaatggtatgagatcagcggaaaagcaaaattgcattcgatcgtattacctgcggcactttcttcaaaaccggaatataaaaagatgggcaagtttgcttatggagaagtggaattagaagaaggaacaagattaaatgcagtggttcggggaattagtaaaaagaatcgtgcagaactgacagaaaaacttccgttgaatatccatgcatccattatagagcgtgatggcggattcaaaacagtcgtatttgatctggatgaagaacaataaaaaaacagatgaatttgatcaggaggaaaaaagaatgtcaagacaggaaattttagaacaagtattaaacatggtagcaatgtcatataaaaaagatgtcgcagatctttcagaaaacacatcatttaaagaagatttaagcggagcttctgtacagatggttgctttggtatctgagattgagaatgaactggatgtggctttgatgttatcagatgccagcggatgtgctacaatttcggatcttattgatttgatcgaagaagaaatgtaatggatgttaagagggaaaaatgagtgtaattgatcagatttttgaaaaagcaaagttaaatcctcagcgtgttgtgttcccggaagctctcaatgaaaaaatgatgcaggcagcttatgaagcagggacagaaggatatattgttccggttcttgttggaaatgcagatgagatccgggaaacgattgcaaaaagaggatacagagaagacgtatttcatatcgtagatatggctgatgaaacatacaagaacagtttggcagaaaaatatattgcattgccggagacccggttaaaagaaaaagcattaaaccgtcgtatgcaggatgcgcttcagtatgcaatggtcatgcaggcagtgggggaagcagatgtaacatttgccgggattgattatacaacaggagatgtgcttcttgcaggacagatgattataggaatgaagccgggcatcacaacaatttcaagtattggcctgtgtgacattccgggatatgaaggcagtgaaggatcccttctcgcagtcggagacagcgcagtatgtaccaatccaaatgcggaacagctggcaagtattgcgatttccgcatgtgataccgtaaaatctcttctggattgggagccgagatgtgcctgtgtatgctattcgacacttggaagcgggcagggagaactggtcgataaagtgacggaagcagtgaagattgccaatgaattacgtccggatcttgcaattgacggagaatttcagttagatgctgcaatcaatccggcagttgcacagaaaaaggtgaaaaaagaaagtccggttgccggaaaagccaatgtggtcatctggccggatctaaatgtagggaatgtagcagtaaagctgatccagcagtttggacatgcggatgcatacggaccaatgctgcagggatttaataaggttgtgtgtgactgttccagaagtgctccggtttctgaactgaaaggaaacattgtgatcagcgccgtacgggcagccggagaaaaatagatgtgattttgaagcaggggctggcccctgctttcataaaacctgcagaacttttgagaaaaggagagggatacgatgaaagaatataaagtatgtgcagtcaatccgggatcaacatctacgaaaattgcagtatttcagggagaaacatgtctgtatacaaagaatgtttcccatgatgcacaggagctggcaaaatatgagacaatcagtgaccagcttttgtacagaagaaatatgatcctgaacttattaaaagaggcaaatgttgcattggatgacgtggatgtatttgtaggacgtggaggcggacttctgtcaatggaaggaggcacttatgatgttgatgaacagatgctggatcatgcaagaaaaatggcaaacggagtgatccatccggctgcactgggctctcagctggcagcagaatttgctgcagagtatggtgcaaaagcaatggttgtcaatccgccggatgttgatgaactgcaggatcttgcaagaatgaccgggatcaaaggagtcaatcgtgtcattcaccttcatgcactgaatttaaaggaaactgcaatccgtcacagcaaacatgtattgcataaaaaatatgaagaagcaaattacattgtatgtcatattggcggcggaatttccgtatctgcccacaaaaagggaaaaatgatcgatggatttgacatcgtaggcggagagggtccgatggctcctacacgatgtggaagtatttcggtatcagatctgcttggttatatggaaaaaaataactgtgggatcaaagatgtgaaagcacttttgacgaagtccggtggatttgtaagtcatgtggggatatcggatgctctggaactgaccaggcgtgccaaaaacggagatcggtatgccgaaatgttatggaataccatgatctatcagattgaaaaatgcattggttctatggcggcagtccttcatggagaagtcgatggaattctgcttggcggtggaatggtacataatcaggatctggtagagcagatcacagatgcctgttcctttatcgcaccggtaacggcatatccgggcgaatttgaaatggaagcaatggcagcgggggcaatccgtgtgctcaatggagaagaagtattaaagaaatatacgggagaaccggtctggacagggtttgactgggatcaatagaaaggggaagctcttatgagcgaaaagaagttaaatatattaacgctggcgcttggaattgcagcattgcctcccatctgggcagtactggcaccatttgccgggattacaaccggggcagttgcgctgatctgtgcaggactgtatgtgacaaatggaaataaaatcagtgatgcacttaagatcacactgggatttttatgtggagactgctgggcagtgcttgcaatattcatcatggaaaaactgacactgaatccgaacctggaactgtatggaacactttttatcctggggggtcttgcggtgatcatcggggagaatctgtcaaattatatttttacgccggcatggctgtgcggatgggcgattggtcttacgatcatggggccgctttccatagctgcgcttgggacacttccgatacagatcggtgcagctatgatcgccggagttctgtatgtggggattggcgtagattttttccagaaaaagctgatcggtatcttccgcgggcagggggagtaaaatgatacagacgaagaagctgtcacaacagttctatcgactgcgtgatgaggcggattgtttcgcaagcctggttcttggtgaaaaaaaagcgctgctttttgatactggctgtggtacagatgatctgaaacaggcagtggaagagattacatcccttccgctgcttgtcattgccagtcatggtcattttgatcatattggagggagcggtcagttcgatactgtgtatttgtcagaaaaagactggaatcttctggaatcctacgatgaagatcagatcagacgatgggtgaaggaaatgtctcctgacagagaacccgtgttttgccggaagggatggaacacgatgaagaagctggattttacgcactttgatcttggaaatttatacggagagattgtggagcttcccggacacagtgcaggatcaataggagtatactttccggaatggaaggtgcttcttagcggagatgccctgacaccggttatgtgtctgatctttcaaaaccacggaacaaaagaaacacagcttcgaacactttgtgatgtggaacaaatggacattgaatactatatgacatcgcacagtgaaaaaaagatgccgaaatctctgatttcacgtatgattggctgcatagaacacagtgcgggaaaacgtcattatgcgtacgcgtatccaaagccgccgtatagtaaggggtggttttacctggattccatggaggaggaaccggtgggaatcattgtagagaaaaaaccggaaggaagagttgtatgatttatgtttatcagacaggctatgtgcttgaagaaggagaacatcaatatcggaaagaacaccggattggaagaatgcttttacgggacggactgaaaaagtggtatgggtggaatctgacagaagaagagctggaagaggcgctggaggaagacaagtatggaaagccacacttcaaaagctgcgattcgattcattttaatatcagtcactgtgaggggatggtagtatgcgcactgtctgatcaggagattgggattgatgtggagaaaatacagaattttacagaatccatggcaaaaaaaatcttgacagaaaaagaacaacagattttaaaaagatacgcatcggatcaaaataagcagaacagagaattttaccggttctggacgttgaaagaaagctatctgaaatggaggggcagagggtttttcctggatccgcgtcaggtagaatttgcggcagaagggatagcaaaggaccgggaagggttcacagaatgttcggatccggatgcggcagtgatccagaagctggtggatccagaatatatggtctctgtttgctttgaaaaaggaaaacagagggacgtgatttatgaagaatataaagaggaagcattatgacagaaaatgaacagataaaattaacgaaaaagagatggatggtattattttccagctgtctgatcaatctttgcattggatcactttatgtatggagtgtttttgcaggaccaatggcagcacatctgacagagattctgggacaggagctgacggcggcaaatctggcaatcgtgttttcaatcggcaattcgtttggatttattaccatgattggcgggggatttttaaatcagaaactgggagtgcgccgggtagttttcctgggcggagttttgtttgggatcggatttgtgatctgcggatttgcacagaatgtgtcaggtctggtcattggatacggacttgtagcaggacttgcaatggggcttgcctacgggtgtacgatcagtaattcggtgaaatttttcccggataaggcagggctggtcggaggaattgcaacggcgtcgtatggcatttcttcggtgatcctgccgccggtcgcaaatgcactgatcgatcaggttggcgtcagcaaggcgtttttgtactttggaattgtgatcatttgtattacaggaattttttcgcagtttatgataaaatgtccggaagattttgttccggtcgggtatcaggattctgcgaaaaatgtggggaaaacagtagaagcaaacgataaaaactggaaggaaatgctgacatctcccattttttatgtcatgctgagtatgcttttcttcggggctgttctggggatgatggcgatttcacaggcgtctgcgatcgcacagaacctggttgggatgacggctgccaatgcagcttttgtggtgtctattcttgcactgttcaatacatttggacggatcctggcaggaagtgtgtccgatcgcatcggatgtatcaagactttacagggagtatttgttcttgcagtactttcaatggccattttgtatgcaaatgcaggcgcactttggttttgtatcggaatctgtatggttggactatgctttggcgcttttatgggggtatatcccggatttacagcaggccagttcggaagaaagaatgcaagtgtaaattatggaattatgttcattggatttaatcttgcaggattgttaggccccatctttatcagtcagatttatcgcatgaccaatggctatcgtccggcgtttgtcctggcgatggtatttgcggcagtcggactggtgcttacatttgtatataacgcactgaaaaagaaggagaatgcttagagttcttttagaaaggaaacatacagacaaaaacagcgtggatttctcacgaatatgcgagaaatctacgctgttttttgatttccgggtcagcctccggattttttctgtttcattcttttgatgacttttaagcgagtgaattcttcccgttctttttcttccagtgcatttgtgatactgtagaccagattggtgtacatcggaatggtgatattctgcaaagcgtttgcccgtttctgtgtctttttgatgttcgtagcaaggcgatacgccgcattttccaccatggaaagctttacggtcagatcttttacttttcgaaatgcatctgcagccagatcgatgctttcacgcgttgtactgaatgcatacgtcggcgcaggtacagttggtgtgtattttacatggggaatctcggttcccataatacttcgggtctggatggagatggaattttcaatcggaaccgtataggcaatctgagataccatgttgatcccgtgttcaatattggcgcgctgcaggcactgatacgcataggtaaaagtgctgtcgatctcatcctggatatctcgcgcctcatcgatcagatccatcagttcccggatcagaatatttcgttttttgtccatcagctcatagccttgttttgcaagggtgagggaatttttggcaagcatgagattccctttggtaggaaatgtacgcggatccatataacccctcctttatttctgatttgcgatcgaccccggactggatgtggcggtcgttgtgtcatcataaaccgttggatgatagtatttttccagaatctttgtatccacacggtcgagctcttcttttggaagacgtcccagaagctcccatccaagatttaaggtttcttccatggtacggttttcctccggtccctgtccgatgtatttctcctcaaactcttttccgaatgccagatattgcttgtcgatcggagaaagttcgtcttcaccgataacagaagccaggtttcttgcatcgcctactttggcataggctgagaataactggtttgccagatcctgatgatcttctcgtgtatatccggctccgattccgtctttcatcagacgggaaagagacggcaggatactgatcggcgggtagatggactgtccgtttaatgtacggtccagtacgatctgtccttcggtaatgtatccggtcaggtcagggatcgggtgtgtgatatcgtcattgggcatggtcaggatcggcagctgggtgacggaaccattgacaccctgtacaatgccggctctctcatagatggcagccagttcactgtacagatatccggggaatccttttcggcttgggatctctcctttggaggaggaaacctctcgcatggcttctgcaaaggaagtcatatcggtcaggatgaccagaatgtgcatattttgttcaaacgccagatattctgccacggtcagagcaactttcggtgtgatcagacgttctacgaccggatcgtttgccagattcaggaacatggcaacgtggtctgcaacaccgctttcttcaaaggttctgcggaagaaatctgctacatcgtgtttgacgcccattgctgcgaatacgatcgcaaattcttcatccgaatcgtctccgagagaagcctgcttcacaatctgagccgcaagctggtcatggggaagaccgtttccggaaaagatcggcagtttctgtccacggatcaaagtagtcagcccatcgatggctgagattccggtgcggatatagtttcgcggatattcccgcatgaccggattcagaggaagtccattgacatcccgtttcagttgtgtaacgatcggacccagatcatcgatcggctgtccgattccattaaatgtccgtcccagcatatccggggagagcgcaatctccataggatgtccggtcagtttggtgtgtgtgttcttcaaagacatgctctcagatccttcaaagacctggatcactgctttgtcttcatataactcgataattcgcccgattttgcgttcggaaccattgacgacaaattctacgatctcgtcaaagaaagctccctgtacgccctccagagcaatcagagggccgttgatgctgctgagtcctaaatattcaattgacatgagcaaatccctccttatgcgttcttttccagcacatgctggtaaaatgcgtcaatgtcacggtgatactgggcaaacaattccagtcggtcattcgggacatcatatttgatggcaatgacacggtcgaaaatattttctgatttcagaacagacatcgggtgtcccatggtcaccagtgcacgtgcctgtttgtagagatacaagatggtatccatcattttgaactgcttttccatggatacgcaggtatcatccttgtggaatgcattctgctgtaagaatccaaggcggatgacccgggcaatttccaggatcagtttctgatcatcaggaagtacatcgcttccgatcagttttacgatttccagaagactgctctcctgatttaacagtgccatcagacggtttcggtaatcgacaaattttggtgatacgttgtcctgataccatggggacagatcgttcaaatattcgctgtagctggtaagccagtggatggcagggaaatgtcttgcataggcaaggcttttgtccaatccccagaaacagcgcacgaatcgtttagtattctgtgtgaccggttcggagaaatctccgccctgtggagaaacagcgccgatgatcgtcacagatccgtctgtgccgtttaaattgtgcatcattccggcacgttcataaaatcctgacagtctggatgccagataggcaggaaatccttcctctgccggcatctcttccagacggccggacagctcacgcaaagcctcagcccagcgggatgtggagtctgccatgatcgccacgtcatagcccatgtcccgataatattcagccagagtcagcccggtgtagatgctggcttcacgggcagccaccggcatgttggatgtattggcgatcaaagtggtgcggtccatcaatggatttccggtctttggatcgatcagttcactgaattcttccagaacctgtgtcatctcatttccacgttctccgcatccgatataaatgatgatatcggcatcggaccattttgcaatctgatgctgtgtcatcgtcttcccggttccgaatcctccgggaattgcggcagttccgccctttgcgatcgggaacatggtatcaatgatacgctgtccggtgacaagcggaatggaagccgggaaacggtggcttgttggccgtgcagtacggatcggccagcgctgtgccataggcagagctttttgttccccgttggaaagctccagtgtgatgagcggttcttcgatcgtatagtctccgtctcctgcaatctgaacgaccgttccttccagatccggaggaaccatacatttgtgtgtgatggcatgagtttccgggacttccgcaaaaatgtctccgccgtgcagatactctcctacagaaactgtaatgtgggtggaccattttttggccttatccagtgagtccacggaaacaccgcgggtgataaacgccccgccggattctgcaatcctctccagaggacgctcgattccgtcgaaaatattatttaaaattccaggtgcaagggtcacagataccggatttccagtggcaatgacttcctcacccggacgcagtccggtcgtttcttcatagacctgaatggtggtcatgtctttgtccagggcaatgacttcaccgaccagcttatctttgccgacatataccatttcagacatacagaatccggtgttgcctttcaaatagatgacaggcccgttgattccataaattcttccagtcttaaacaatgcagtcacctcctgagaataagaatttgtcgtattcgttgcgcagcgcagtcttaaaagaatgatcgatcagaatattgcggctgcggatgactgcccggataccgcctgtaaaatcttctgcgctgatggtcaggtggataccggttgcatcttccagagaagaacgtttctcttcgtcggatgcattcagataaatcgtcatgtcttctccgttggcaaacacaatggcattgtgaatgcagcggatcagaaaatcatcgtattctccggttttcatatagtcttttaccagagcgtatgcttcctcgaaaattttgtcttttaattcttgctggatgcgtccctgacggcgttttaaatccagctgagcacgcgccattgcctgatttttttgctgtctggcattgaccgtttctgccttgatccgagtctgcatctgtctttttgcttcaattttatggtcttcaaacactttttccagtgcgtcacgataagagtcgatgacagcattactttcggctcttgcttcttccatagaagtcgtgcgcagatgggtgatcttttcttctaaagtcaagaggatctcctcctttaaaaatttttgccttacaatttcagcccgatggcttcggtaatgtatgaggtgataaagtcttttttgcgacccgtaccatgtcggtccgggatctcgatcagcaggggaatctttcgctccaggcggaattcgtccagaatatccggaaattcctgcccgaatttttcagtcagaagtacaatgccgatggatttgtcctgcagaaccttttctaattgttcccgcagctcctttcgttcatgtacgactacaccgtccacacctgcaaggcgcattcctgtgtaagtatcgacattatcactgatcagaaacatcttcatcttagagtttaccgaggatcatgaaggagatgatcagtccgtacagacatacaccttccgcaagacctacgaaaatcagagatttaccgagtacgctggagtcttcgctgattgcgcctaaagcagcggaggctgcacttgcaacggcaataccgccgccgatacaggaaagcccggtaaccagagctgctgcaaggtatccaagtccggttgacagagcagaagaagccgctgcggcatcagctgcctgtgcctgtggacctgcaaacatcataatagaagcgatcacaaatgcaccaaagaagaaaaagacattggttccgatggcacgtttgtattttttgcggttcttttctccgatcagataatatccaaacggaatgataatgcttaaaatcaatgcagcaatgagaatgagttttgttgtaagtgtcataattggaatcctcctttaagaacgtttcttttttgtagtttgagttttggtatatgggtcaaaagctcttccgcttcctttatagaaacggctgaacatctcgtaatattccagacgaagcacctgaatccctacgatcagaccctccataccacatacgaacaggttgcctaatacgatgactacccagttcggggagccggattctgcaccggcgagcatcagcaccacttccatcatggcagcatggctgacagcaaaagcaccaatacggacgaaagaaagggtattggaaaaataactcagcagggtctcaaaaatctcgaaaaatccctgtacaaagaacatggcctttccttcttccatcttgtctgcacgcttttgaatctttttcgtcaaaggctctttgaacaggatcagcaagagcggaacgccgaacataactgcaaggacgattccggcaggtgttttatgacctgtcataaagagtacaatagtgacaacagcagatgcataaaatacaagacctgccattccgtttgcatcaaaccatgcattctccacatcatgagagcgaagtgcattgatgatgtgcagaatcatggcaaagatgatcagccccataccaaaagccacggatacgataaatacagtattgagttttccgataaacggcagtgtggtcatgtggtcgatgggtcttagccaaagcggttctataatatcttcaaatccgaaaatacttccgaacatcagtccgaagatggtagaaaatacacctgcacaggcaatgattccggccagtggttttttcttaaagtgatagaccaaaaaacctccgatcaacaggagcagtccctgccccacgtccccgaacataactccgaaaataaaagagtatgtgatggcaacaaagacggtcgggtcgatctcgttgtgggcgggaagtccatacatgccaataaacatttcaaatggcttgaacagctttggattctgcagcttgaccggaggttctccaaagtaagtattccgatcttcttccacgacaacaaatactttatcatcgtctttgacttcttccataaagcgtgtgacatcatcttctgacatccagccacagagaatatagtaatcttctttctgatcctccatgcgggcggccattttccggacatcaaaattgtgtgcaagttcttccagccgttgttttgatgcgacgatctgtggtgctttttgagcaagcatatcagcggcttcctgattgagatcattgatcttgcgggaaacctctgtgatctgtcggttcagcttctgataggcatctgccggtgttcctgtatattcatcggggatggtgattttctcaaaatgcagagagcggaataccgcatctactttttgagcttctccgggtgaaacaaaatagacaccatagagatagctttcatcctgttctcctttgacaaaaatagctcccagatcatccatcagatacttctccagacggccatattgttcaaccggaatccgtccaaatcgataattgatgtatttgtagtgcaaaatccgatccagttctccatccagaggacggaatggttcgatcagtttttgcttgtttaaaagcgtttctgtttcttttttgagcgtttcttttttggactgaattttcaggtaagcctcattcgtggtacgaatcagctcaaaaatatcatccagaccaagagaagtatccggggtgatctcatctgcgttttccagatatcctgcaaactcttctgccttgccgagtgcatccttgtaaggattgatctccacgaacgggcggagattatccacagtttttagttctgacagagcagactcgagctggatctcatatctggacagatagaggtctgtcacccggtcgatatcatttcttggaccggatatattgatgaatttcatttttacgatcattaaatttttcctccaacatatcctaaagtctcgcccggatttaatccatagcggatacattccatggcggtcgtcagttttcgaagttcttcttcttttaagaacagatacatattgatcgaagcgatcgaataaggattctgccttcggtcggctgtatacaaatgatacaggcagtcttcatacatctgttccatggtcagttcctgtccgaaatcataatgtcttgcataagatgttttctgaaacagcgtaaaaaattcatctacatcagatgcctcaaccatcgctttgatctgttccacggatacacgatagtggatcggaatcagaagtgaatagatatcagcttctttcagatgaaaatgctttttggaacgatagatccactgcatattcagcagatcaatcttggaaccgcagtctctggtaaagagttccagttcttttttcttcagaaacttttttcgctccttccacattgcggtgaaataataaagattcaatgcaagatcataatcaaacagggtgacatgctgactgtcttttaattttttcaatggttcataatactcggtatcttttagattctctacgagctggtcagtagttctggaggtgatcagcttttcgatggaaatctgcgagtatttatcaaagaatggttttttgtggttcagatcaaatggttcctgataatgattgattacaatacgcagacagtaattgatcaaatccacttcataccgctttaaataaagttttaaaaactttctctgtttcggaccgcagaaacggtaaatctttgtgtaatcgtggtacagcgagagaatcagtactttttcgatatttcctctgtgcagcatcgcctcgttcatatcctggagcacatcctgataagacgaatgtgcatttaaataggaaacaagttcggtgacactggtgagagccgctatctcttcaaactgttcgtctgtaagaagtctggcctccatggcgcgcagcttggtaatgatcccactgtattcgagtaagtttcccatatgctacacctctgtgattcgctttaaaatttcctgtgcgtaaaacgtatgtctgttttcgtattccttctgtaatgcgagtacgcagctgtcattggaatctgcctgacgattcagaagagactgggtatctgcttccagagattcccggatcttctgaagctgagcctgggtcttttgttccagctccagatcaaactgctttcgtttttcttcgtattctttatccaggacggatttctgaagttctgcgtgttctgcaatggcagatgcggccatttcaatctccgtcaatttgttaataatagactccataaaaagccccctttttgtcagaataaataacatacattatcatacaccttttaaataaaaaaacaatcactttgtcgattattttatgatttttcataaaaattcatatgaaaataatcaaaatagtcatatttgtctgttttctggaatatatagtttgtacaaaactatgaaaaaataaagtgcaaaaagcaatatattacataaaaatgacaataaaacactagaaaacagggggtgtggtaaaatataatgaaaatgataagtatattgtggaaaaactattcttttcacagtataaatttggggcaaaacaaggaggaatactatgaagaaaggaaaaaaaggccttgcattggcaatgacactggcagtcacaatgacttctgtgccaacagcttttgcgctggatggcaatgcacagccgacaaagcagccggataatcagttgggtcagagagatacaaaagcgatttcctacaagtatacaaagctggatcaggcaccaatgaaggaaagtgtgcaggcaagctctgagaatactccgatgcagtataatgaagggccggcaaatctggcttttgacggaagcaatacgacagcatggcataccgtttatggccaaaataagagtccgtataccatcacatggggacttggcggcacttataatgtagggaaaattgattatacccgcaaagctgacggagcaaacggaacctggaagagtatcaagataagagctcaaaaagaagacggaagctgggtagaggttggaacaaaggagttggaagaaactgcgcagggtgcaactacggagattacctttgaaccagtagaagcaaaagcattagaggtgacgattacagatagttataacagagaatctacaaaatatgcttctgccggagaaatcaatgtttactccgtaacaaaagacgtgactttggtagatccgattaaagtcttgccagaagaaggaaagaccgctacgatgaaagagggcgagacccagcagttcagatatgagctgactccggaagccatagaagcaggcggaactgtaaaatggagagtccaggacagcggcgttttgagagtagatgaaaacggtgtcgtaacagcaatcggagcaggaaacgatagagtagcggccagttataaatttggaaatactacctataatacatacctggcagttacagtagaaaaagtagagacagaatgcacgattagcctgaatggcacgcagtatacaggaaacagcctgcaggaagctgtagaacaatcaaaattgacagaattaacgagtgtaaaatttgagagcggtgtgattcgtgatacagattttgattatttgaagaagtttaatcgtatcagatggacacttaaagaattcagcattggtgatgatgtcgaattacggggacttgccggaaatgcaattccagtgaatgccttctataaagataccagtggatatgcccttacagatgtatatcttggaaaaaatgtaaaaggattggaatcccaggcattcgcttattgcaaggaacttacaagttttgtggctccgggattagaacatatgcatgagaatgcattaaatcgtgtaaataatttaacagagttgaacctgccatccttaaaggaagtcaaaggtccaatatttacgaatgcaataagcaatagtgtaaccaaaaccgttaaacttccatcggttacaacattggatgtggattcgtttagatatttaaaagcattggaaacattggagttgggtgcaacacctccaacattaagcagtacgcacgatgcattaaaggttgcttcagacaatctgcagctcgtgatcccggaaggtgctttagatgcatacaaggcaagtcctggatacaatgcagatcagaatacatggtatggaattaagattgcacaaccacaggaagaagttcatatcaatgcgacgatcaatggaacagctgttgacggtgcaagcctggaaaaagcagttgaaaaatcaggtgtagctgtggatgcagtgactactttgacgatcaattccggaaaagtaacacaggaagatctggcttatttgaagagcatttcaagacttgagacgttcgaaatgaatgttggagaaaacctgcagctgattggaaaagatggacagcctactactgtattgagtaaagataccgcagtgattgagtttgcaccgaaacgtgctggaagcagccgcgcagatattgtcaatatcacacttggcggaattacagagattcaggatggtggactgaaggaacacggagcatcagaagaaatccgtatgccggatgttgtaactgtaggagacagtgcattttataatgcagagtatttagagacgttagatttgtccagtgcgcaaacaatcggaaactatgcatttggatactgtgaacgtcttacacaacttactatgaataacgttcagacgttgggaaaaggttctttccagtatacaaatagtcttcaaaagttaacacttcctgcaactattcagacgatagaggatattcaatttggtaagacaaacagtggaaataagagcaaggctaagattacgattttagcaacagaacctccaactgttgcgaatgatgcatttaaaaactacaatggtggttcaggcgagccaaccgtaacagtgccgcagggatcactggcgaaatatatagcacaggtgaacccaggcgtagatggaacaaaagtgatcacatctaagcagagaatctggaaaaacttatacctcaaagaagagggctcttatactgtgaaatattggtctaagagtaagtatccggtttatgatcagtatgcatatgttacggcaggaaatgcaattacagcagataaactggcagctctgcatccaacagatgtgaaggatttgaaagaaaacgaagaattcaaaggctggaatacaatgcaagatggctccggtgatatggtgacagcagaaacagttgtatcgcaggatatgacggtttatccggtgatcggagaaaaagcagaagagatcaatatcaatgcaacgatcaatggaaacgctgttgatggtgcgagcctggaaaaagcagttgaaaaatcaggcgtagctgtggatgcagtgactactttgacgatcaattccggaaaagtaacacaggaagatctggcttatttggagactatttcaagacttgaaacattcgaaatgaatgttggagaaaacttgcagttgatcggaaaagatggacagcctactactgtattgagtaaaaagcaaacagcattgacctttgcagatagtgtacagaccataactcttggcggaattacagaaatccaggaagagggaatcgtggcaggtaaagcaacgaatattagtttgccggatgttataacagtaggaaatgatgcattctataagtatatgtctctggagactctgaacttgccaaaggcaacaagtataggatatcgagctttttatgattgtagaaaacttcaaaatcttactttagaaagtgtagagatattgaaggaagactctttctatcatacagataagttggacgatcttacacttccgggaagtattcaaacgatagagaatatcaaatttggtgtatgctatcaaggaaataagagcggcgctaatctgactattttggcagaaaatccaccaacagtggatccgggtgcatttagcggagtaacgtcaggttcagagctttataagatggcaactgtaacagtgccaaatggatctctggaagcttatgcgaaacaaattggtgacgcagatgttagaaaagtggtaacgaagaaagatattttatggaattctctgtatttgagagaaacaggcacttccgtaattgagtattattcaaaagccggaaatgtacatcatcaatatgcatatattccaaccggaacggcaattaccgcagagagattagcagatctgtcacagtctgacaaggataagttagaggcaaatcaggaattcaaaggctggaatacaaagaaagatggttccggtgatatggtgacagcagaaacggttgtatcagaagaaatgaccgtttatccggtgatcggagaaaaagcagaagagattcatatcactgcaaaagtaaatggcggagagtcactcggtggagaaactcttgcaaaagtagtagaaaaagcaaatacgacagcagaaggagttacatctctggtgattgagtccggaaaagtaacacaggacgatcttgcaacattgaagagcatgacaagactgacaaatctggaaatgaatctggacggagatctggagctgattggtgcagaaggaacagcaacgacagtattaccggctgagttattcataaaatccagtctggagacagtttccttggcaggatttacagagattggagaaagcgcttttaaggatacaaaatatctggaaagtgtaaccattccgaatgtgacagtgattggagccggagcatttgcaaatacagcgagacttgagagtattgaacttcctgcagtgacagaaattggcgcaagtgcatttgcaagagctcagaaattagagacagtaacaatgccaagtgttgtgacgatcggagcgtcagcattcgaacatacattggtagaggatgtaacactccctgctacgatcacaagtattggatccagggcatttgttggtaaaccaaatggtaagagagaactgcatattacgattgaaacagcaacaccgccgacaattgatggttcttttgcaacacatgccgatgcttatgtgaaagttccagacggttctcttggagcatatttgccgaatctggatctgagcaaaccatttaaaaattcaggagatacaacatggggcggacttcgcgtgattgataatgcgcagaaactgctgacttatcatggagtgaacagctgggataagatgtacgcatatgtggtaagcggtacagcgatcacagagagcagattcccgactacatttgaaaatggagacaagatcttaagtggatggaatacatcaaaagacggaacaggaacaccggtggatgccaacacagttgtaacagaagatatgacgctgtatgcacagtggagcgaaccggcagtggatctggatgttgccgtatcttattcaaatgtggatgaagcaggcgaaacaatctggacaaatcaggatgtgaccgtgactctgacagcaaacgaacctgttcaggatattgaaggatggactcgcgtatccgataccgtgctgacaaaagcttacagccagaatggaacatacagcgttacggtagtttccaatgacaatcagcagaaagaagtgacctacacggtagcaggcattgacaaacaggctccgaatgtaagcgtcaaaggcgaaggaaatggagaccgcttccgcaagatcacaggaatcgcagtgcacgatacagaaggtgtcaaagaactgaaggtcaatgatacagttacagagatcaacagcaagtacaaatacctgacagacatcgaaaaaatcggtgtaaaagaaggagaaaatacagcagttgttgtagatcaggcaggaaatgaaaagactgtgacattccactatgataccgttgctccgacattccagtggatcgtggacaacagtaaactggaacagtccaaagaagtacgtcttgagacaagcgaagagatccagcttccgggtgaaggatggtctctgaaaggccaggaaaacggaacttatgtctatgtgaagacatttacagcaaactggaaagacaaagcatttacagtgacagaccttgcaggcaatgtatcagaaccgcagtttgtcgaagtaaaacgcatcgacaatacaaaaccggcagtggtagaactgacacaggatatcacagactggaccaagaaagatgtaactgtgacgatcaagacctctgtagactgtgcaacaccggaaggatggaagaaagtcgataagagaaccttcacaaaagtatttacggcaagtggagaatacagcgttaccctgacaagtgcaacaggtgtgacaggagatgcgtatgtatttagcattacaaacattgacaaagaagcaccggtgattgattatgcagccattgaagcagcaaagggatataagagagagatcccgttgaatgagggagaagagtacacagaagaacagctgacagagatgttcacaaaaccggagtgggtaaaagacaattccggcacagcagcatttaaagtagataaatggggtctggaacatggactggatggatatcagccattcacatcgaagacaccgggagagtataaagtacgcttctatgcatacgatgcagcaggaaacagcagcagctttgacgtgtatgtgaaagtcctcgaaccggaggtaccggaagtagaggaacgtacaacaaccgtgaactatacggtatttgtggatcatcgggttcgtaccggacagtggacgcatacaggaacagagacaggagatttcacattcgacctgtccatggtaaaatatctgccatccaactataaactggcagaaggagagactggatacagagttcttcagtatggagatacaactgctgtaacattctatcttacaacaaaataaatcaggctgttgatctcagcttgagtgaacacataatttccgtcggaacagatgcggatcatttcctgctctgttccggcggaaattgtaattttatcagaaatttagtttggtatattctggttttctgctataatagaatggttccttggaaaggacattgaatcaggggattacagaagggagtataggagatgagattacgtaatattccgcgtgcggagagcacgatacagagccacagggcagtgatcagacgaccagaagatcaaagaggatgctgggagcaggtatttggaaatgagaaaccgattcacatagagattggtatgggaaagggacggtttttgctgaatatggcgaaacaacatcccgatattaattttatcggaattgaaaggtactccagtgtgctgctaagagctctggaaaaatacgatacagaagagtttcaggagctgacaaatgtccggtttgtctgcatggatgcaaaagagcttccggaagtttttgcaaaaggtgaggtaggccggatttaccttaatttttcggatccgtggccaaaagcccgccatgcaaagaggagactgacttctacagagtttttggcacgctatgacaagattcttgcagaagagggaagtctggagtttaagacggataatacagagctgttccatttttcgttggaacagataaaagaatatgggtggaaagtattttgttatacatatgacctgcatcatcatgaagagatgaataaagggaatattatgacagaatacgaagaaaaattttcagcaaaaggcaatccaatcaataagctgatcgccggaagagcttcggaaacatcggcagagtagctcacatcttttgtgatgcagcatacaataaaagggaggaatacgcatagttggagagtggttgatgggctggaaaagaagctggaaagagaaactgcgacagagagtatattgtcaggcagggctgaacagacagatattatgcataaagcgttcactggaagaagtatgtgcgatactcaatacaggatgttgccataagtaataaaaagagtaggtgtttgagatgaagatccgagtgactgcgaaaaattatccacaggaagtactcaggtcggaaacaccggttctggtagaattctttgcggtatggtgcggaaagtgcgctatgatggaggatatactggatgaaatcgcaaaggaatacgatggacgcatcaaggtgtgtcagatcgagattgaggaatctgcatgtctggcagcagaatttgaagtagaagttgttcctgcgtttgtggtattccaagatggaaaaccggtgaattatgccaatggggtactgacaaaggatgttttggtcagaatgttagaaatttaaaaagagtttttcaggggagcagttgtttgttctgtctcccctatgaagactatgtcgtatataataatagaaaaattcaaaaaaattcaaaaaaatcaaaaaaacacttgttttttttgtgagagtcatatataataattcttgcgttacagattaggtaacatcacaaagatgcgcgattagctcagttggtagagcacctgactcttaatcagggtgtccagggttcgaacccctgatcgcgcatttagaaatcactgtttttgcagaccagaagctgcgggggcggtggtttttttgcgtatatagaaagaaaagtcgtaatattgacgaaagacgggctcaaagctataatgaacatatgtgatccagatcgtgtgttggaggtggaatatgggagaaaaaaatagtaaatggttaacaccggttccgaaacagtccttatcgaagatggtcgttgaaaaaattaaagaagcactcattaatggggatattaagccgggagattttttgccttctgaaacagaattggccgaatctttgggtgtagggaagtcaagtgtacgtgaagcgatcaagatgcttgaggcattaggcgttgtgcagatttgtaaaggaaatggaagccgtgtcaggacttgtgtacatgcgtctatgttgaatcctttgatttttcagctgattctgaatagtaatgaagagcgccaggcgcaattggtggaatttagaaagatgattgagatttcagcaagtttgttggcgattgacaatgctacagaagaggatattgaacaattacgggaaatacacgaacagtttaaaacagattttaaacgtggaaaagcaacggtagataatgatatgaaattccataatgcaatttataagagcacacataatccgtttgtagtgagcattggtgattctataatggaactgtttcatccgtctcttgtgattgcgaatcgggattattcaaagatcgttaccgataatcatgaacagatcctggctgcattggaacaacgtgataagaaagcgatggaggctgcaatacgtgacgcactggatgcatggagcagtctggcattgacggctacgttaagcaagtaaaatgtgttttgtaaataaaaatattttctgtcaataatgaaaaaagattcttagatcaaaagtaagcgactaagaatcttttttttgttggaaatatacaaaatgaagagcaatatattggataaatagttgaaaaataacaaacacattgacttcttgcgtacaaggtgataccataatatcagacaacagacatcagatgactggtgtcagaataaaagagaaaaggagaaggaactatggcaaatatttattatgatgaggatgcagatctgggattggtagttgacaaaacagttgcaattattgggtacggaaatcagggacgcagccaggcgttaaacatgagagattcaggtgtaaagaatgtgatagtaggaagtcggcatgatgaatcctatgatcaggctaatgcagatggatttatggtgtattccattgcggaagcagctaaaaaagcagatattattttcttgcttttaccggatgaggttgcaccggaaatttatgaagaacagatagcgccaaacctggagccggggaatgttttgaatttcgcatcaggctataatattacatttcatcgtatcaaacctgcagaaggtttagacgttgttatggcggcacctcgtatgatcggaaaaggtgttcgcgagttatatgaaagcggtgaaggatcaccggcattcgttgcagttcatcaggatgcatcaggaaaagctctggaatatggaaaagctctttgtaaagcgatcggagcaacaagaaaaggtgcaatagaagttacatttgatgatgagacatgtttggatcttatggcagagcagggaacatggccgatcatttacaatgtatttgtagaagcattcaaattacaggtagagatgggacatccggaagaagcagtacttatggaaatgtatctgtcaaaagagccggcagttatgatggaaaaagcagcagaggtaggattcttccgtcagcttccgttccattcacataccagccaatacggacagctgatcggattccaggatgttgacacaacagagatcagaaaattcttaaaaaatcgctacgacagaatcaaaggcggagaatttgcagaagaatgggataaagaacagcatgataaccatctggcaacattaaataaattggaagacgatgctttcaactgtgaatttaccaaggcagaagatcggctgaaagcaagattgaaataatagttgagagatattttgttatatgtcaataacagagaagggggtttcttatggacgtgaagatttttttatggttggcaatatcgattgcgattatattatttacaattttaaaactgaaattaaaccctgcgatttcattggttcttggaagtctttttatgggaattgcatccggacttggagcaacggaaacaattaccacaataggatccggctttggaaatttgatgacaggtatgggactctccgtaggttttggagtgattctgggtcagctgctttctgattccggcggagcaaaggtaatcgcaacaacaatgatctcaaagacatctgaaaaatatgcattatatgccttgggaattacggcatttttgttatcgattccagtattttatgatgtgacttttgtaatcttgattccacttgcaatctcagttggaagacagattcggaaaccgctgccgtacacggttggcgcgatcgttattggagccggagcagcgcatacgctggtaccgccgacaccgaacccgttggctgcggcagagattcttcattttgatcttggaattatggtcattgtaggaacaacacttggtctggtttctgcactgattgcgatgaagatattgtttaccttttttgataaaggtttctggaaagcacagaaagatgagacaggcattgaagtatatgaagagcgaaagagtacagagacaacaggcgaaatgccgttccttatggcattgcttccggttatccttccagttattttaattctgatcggaaccgttatgggagctttgggagaagtcccgtcagtgattacatttttgagtaataagaacacggcacttcttctcggtgcattaagtgcatatcttgttgcagcaaaaacgatgaatagagacgaaagagagaaatcgtctacagaagcgttaaagagttgtggtattgtgttactgattaccggaaccggcggatcttttggggcagtaatcagtgcgacaggtttagctgatatgctggcggagacaatcaaaaatatttcggcatcaccaattcttgcactgtttatcgcatttgtcattgctgcactgttccgggttgcacttggatcaggaaccgttgcatcgattacaacgatgacaattatggcatctgttccggcagctgtcggaatgcatcctgtatggatggcaatcgcatgtttatccggttcgctgagttgtggacatgtaaatgacagtggattttgggttagtacaaatctttccggatttaccattacaggaggattaaaaacatatactttcggaaatgccatcgtagcggtatttgcaatgttgtttgcagtaattggctgcctggtacttcctatctaaacagagaataaaaaacaagagcgttgcaaaatgggtaagtaattacctgtggagcaatgctctttttgtgtgtttgtggattcgtacaaaaaatctgatattggagaaaatatcagtggaaaaatgacaaaattgataatttcatagagctgataaaaaacaaagagaaaaaaactgacaaaacaatacccaaaaagagagctaaaataaaaaaagtgtacaaaaagtaaaaaaattatcactagaaaataaattgcaaactgataaaataaaaacaagaaaaaagcccgggacaaaaaaatggagaggaaaagaagtatgaaaaaaagagtaattgcaacatttttatcagtgatgatggcagcttcagtattagtgggatgcggcagtgatcagaaagaagaaaaaaaagaagaaacaacagcctggcaggatgtagattattcaggtgaagatccacagttggaaaagaaaatcaaattcttatcaatttgggcggaagataatgataatggaattttgatcaataaaatttgtcaggattataaagacaatgtcaatccaaatttcgagtgggaatatgaaatggtttcagcagataacctgacacagaaaattgcaacattatctgcatcaaacgatctgccggatatgttcgcatatgaagcaggagcaccacttacaacattgatcgaagcagataaagtggcaaatgtttcagagattgtggatacaatcggtgtatctgacagcctgaatgaaggagctgttgaattgatgaaaggtctttcaggaacagacgatctgtacgatctgccactgggacttaacgttgagggattttggtacaacaaagagctttttgaaaaagccggatgtgaagccccgacaacatgggatgaatttgaagcagttctggaaaaactggatgcagcaggaattcagcctctttccacaggaggatctgacaagtggctcgcaactcgtctgatcaatgcgtatgcagtaagaacgatgggaaatgatgctctgacaaaagcagcagaaggtgagattgactatacagatgagggctttgtagaggcagcacagaaactcgcagactggtccgaaaaaggatatttcggggaaggtgttacaacagtagatgccaatacagcaggttctatggtgatgagtggtaaggcagcaatcttctatacaggttcctggtttacacagaatttgacagatccatctcagaatccggcaggagaagacggaattggattctttaacattcctgtagtagatgagtcagtcagctccgcaacttcttattcgatgaactgtggaaatatccttgcactggacaaggcaaaatttgatgaagggacagcatggttcttaaaatatttcattgaaaacatgggtaacctggcaatggaagaactgggaacagtcaaaggttatacatatacaacagaagcagaagacatggattcttatacaaaattagttttggatgaaattgacaaatcaacagaaggatttgcatggtgggaagcaaaaatgaatgctgaactttcaaaagtagcgcaggaaaacgttcagccgttactgaacggcgacatgagcgccgaagaatatatgcagtctattcaggatgtatatgacatgaataaataaaacaaggcttccagacagatagaaaaagggaagtgtttggaataaaagctccgaacatttcccttttctcttagaagaaaggaaaagagatatgaaaaaagtattagcgaacaaaaaagcaattgcgctttttgtagttccgggatttgtattgtatacaatactggttatcgtaccggttatctggtcactgtactattccttgttcagtggaagcccgggactacagtgggaatttgtaggatttgataactatgtgaaactgtttcaggataagaacttcttaaatgcactgtgggtcaatgcaaaatatatttcggtcgtaatgatcggtcaggtcggactcggtttgcttcttgcattgatgtttcgattctggctgaaacgctgtaagacgattgtacgtactttagtatttttcccggttgttcttccaaccgttgcagtcggtcagttgtttgcaaaaatttatgaaattcagccaagttatggtctgttaaacagttttctggattcgattggactaagtaatctggtgcagccgtggatcggccaggcaagtacagcgttgtgggcattgtgcgtaatggatatctgggtggcaatgggattctattctgttatcttctacggagctcttctggatattccagaggatatcctggaagcagcaagaattgatggagcaggaagttttcagatgtttaagagtattttgcttccactacttcgtccgatgatcatcaccagccttgtatttagtttctcaggaaccgtaaagatgttcgaatctgcgctggcattgacgaacggaggacctggtactgcgacgaaatcactttctatgtatatgtatgatgtatcatttacatacaacaaggtcggatacggaagtgttattgcgattgtaatattcctgatctgtattattggttccagaatcattaacagatttgatgtgaaggaggagtaaagatgaaaaaggtaaaatccggtttaaaaggatttattattttcctgatctgtgtgatagaagtatatccattgttttggatgttgacggcttccttgaaacaacagtcagagtggagtgaatatccggcatatgcattgaataaagggttctatttccagaattacgtggatgcatggacacgcggaaacatggcaacattttttaaaaacagtttgatcacaacagtagtttctttgatctttattgtgatttttgcaacaacgattggatttgcagttacaaaaatgcagtggaaaatgagaaaaaaagtggcatcttactttacgcttgggatcatgattccggttgcaactgcactgattccgttgttccagatttacagcaaaacaaaccttttgaatacaagaacctgtctgattctgacgtatatcgcgttcggtctgtcgctgtcaatctatctggtacagggatatttaagatccttcccggatgatattatggaagcggcagtcatcgatggatgtgggatctaccgtatgatgtggcacattgttgtacctctgatgaaaaatgcaatcgtaacagtacttgtacttcagttcttctttaaatggaatgatctgctgttctctatgacgtttatcagtgactcttcattgaagactgtgcagacaggacttctgtacttctctgatgaatttggcggtaaaaactggggcgcaattttcgcatcggtttctttgagtgtatttccgatgttgatcttatatacacttttgaataaaaaagtaatggaaggaatgaccgcaggtgcagtcaaaggataagcgtatggacagagaaaagatgcagcagtatacagagaaaatccggcagtttgtaatggggcataccgaagatgtattgaaatatccacgtagttttatccgatatccattcatcgatcccggctctgtatatgacggaaatgtgtgggactgggatacgtactggtctgtatatggatttttcaatctggcagattcgtatccggatgatacgacaaaagtacgtctgattgaacatgctaaaggaaatattcataattttatggatcatcagcttccggatggatatattccaatgatgatcgaagtggcagactggccggaaccatatctgaatatgaaacataaagaaggaatcctgatgaatatgcacaagccgtttttgtgccaacagattgtgctgatcagtgattttatcggagattattcctggtgcagtcagtactttgaaaatcttgaaaaatattttgagtgttacgatgagaattattattttgaaaactgtgggctttatgtctggtgtgatgacattatgattggaatggataatgatccggctacatttggaagaccgaaattttctacagccaatatttatctgaacagctttatgtgtatggaactggaggcaatgaaaaagatttgccggacatttggaaaggaagagagagcagaatattaccagaaaaagagagcaaagctggttgaagcgatccagaaggaatgctgggataagagagatcgttttttttactctgtggacgtggatatcaaaacaagaaaattcgactggtttcatgaaggacttggtgttttctggaaaacacttccgatcaagatccgagtctggtccggattcatcccgatgtatgcagggtttgcaacaaaagagcaggcagaagatatggtgcatcacatatttgatgaagagacatttgcttctccatacggagtgacgacacttgcaaaggatgagaaaatgtttgatctgtcggtaacgaataatccgtcaaactggttggggcccatctggctggtggccaattatattgtctttaaagggcttttgaattatggatatatagaagaagctgaaaaaatatgtgaaggaacattacttcttttgggaaaagatctggaaacaacaggcagtcttcatgaatactatgatccatttgatggtcatccgatcatgaatgccggatttatcaactggaatgttcttgcattaaatatggcagatgaattaaacgggaaaaaatcgatggcttaatggaggtagaaccatgatccaaaatccgatcttgcagggattttgcccagatcccagcattgttcgagtgaaggaagattattacatcgcggtctccacatttgagtggtggcccggtgtcaggctttttcattccagagatctggaacattttgagcaactgccgtctcctctgactagagtcagccaactgaatctgatgggcaatccggactcctgtggagtatgggcaccggatctgtcctatgatggagagcgattctggcttgtttttactgatgtaaagacaagaagtgggagtcggtattataatacacacaattatgtcgtatggtcgaagaatataaaggaggggtggtcagaaccagtttatttgaacagtactggttttgatccttctttgtttcatgaaaaagacgggaaaatgtatctggtcaatatgatcaatggattcgaggggatccagattcaggaatttgataaagaacaaatgtgtctgatcaaagagccggtcaatgtctgcagagggactggaaggggatttacggaaggtcctcatctgtatcacatcggggaatggtattacctgatgatggcagaaggtggtacttcttatgaacactgtgagacgatgtgccgttcccgttctctgtggggaccttatgaggaggatccagggaatccgatcctgacttctgatccggtaaagacggatgcactgcagaaatgtggtcatgcggatcttgtacagacacaaaaaggagaatggtatctggttcatctttgctccaggccgaacgccaacagaaaatgtgtccttggcagagaaacggcacttcagaaaataatgcagacacaggacggatggtttcggctggcatcaggaaaacgctatggagaacaaaagattcctgatttgaaagagattgaaaagcagccgtttgtcaagctgaagcttaaagatgaatgggaagaaaaaacaatcggtatttgttacaattcgctcagaattcctgcggaacgatttgcttcttttacagacagagagggataccttcgattgtacggaaaagattttttgaactctcattttgaagtcagtctgcttgcaagaaggcagacaaagttcaaaagcggaatctgtacctgtatggaatttcagccggaatcagaacgacaggctgccggagtggcatatttctacgattcgatgaatttttatctgtttataaaaagcggaaatcattatggggtggcatggctggaagtcttagaaagcgacggaggagttgtacaaacgatcgcccggcggactttatcagaacaacagccaggaatttttttgaagatacagacagatgaatccggagaacatgcagaatttttatattcccgggatgacagagtctgggagaaagtggcggaaacgaaaaccgatattctgacagatgaacattgtgtaggatttacaggagcccattttggaatttattgtcatgatatggaacaacgaaaaggatatgcagattttcaatattttgaattgttggaaggtgagtagggaatggaaaaagaacatatttattataaagattcagtagagcagtgggggctttgggaaattgagattcccggaccttccacaggaaacccgtttatagaacagacagtaaaagcagtgatatccgggaaaaatgagacaaaagaaatcgatggattttatgatggaaaagggcgctataaggtacgttttatgccgtcgtttcaaggtgaatatcagtttcatgtcaccagtagttttcaaaagactgcagaaggaaaatttcgtgtaacagagccgtctgagaataatcacgggccggttcgggtagccggaacctggcattttgcttatgaagatggaacaccgtattattcagtagggacgacttgctatgtgtgggagctgcagtctgatgaacggatccaggaaacactggacaatctgaaagctgccagattcaataagatccggttttgtattttcccaaaacattatgcttacaatttcaaagatccgagaagtttcccgtatgaaggaatacctatggattccaatgtgctgacagaggaaaattttggaacatatacggaggaatctcagggaaatcattgggattttcagagatttcatccggagcattttcagcatatcgaagattgtattttaaaactgcagaagctgggaatcgaagcagatatcatcgtgatgcatccttatgacagatggggcttttcctgcatgagcagtgaggaagatgatctgtactggaattatgttgtggccagattctctgcataccgcaatgtgtggtggtcactggccaatgaatatgatttgatgaagcataaaacattggaagactgggaacgatatgcccggattttgtgcgaaaaagatccctatcatcatctgcgttccattcacaactgtcacggattttacgattataacagaccatggatcacacactgcagtgtccagaggcaggagccttatctgagtgcggagtatgtgaccaagtggagggaaacatataaaaagccggtagttctggatgaaatctgttatgaaggaaacctgcagtttggatggggaaatatcagcggaaaagaattgcttcgaagattctgggaggcatcctgcagaggcggttatgcaggacatggagaaacgctgttggatctgacagaagatgagaaggtattgtggtggtctcatggaggaacgctcaaaggagagagctggaagcgctttggctttctttatgatatattgtgtgagactccgggacacgggcttgcaccgtatgatctgaaatgggattgtgtctgtggtgtaccggaaacagactggaataaaaaagtaaaaagctattatctcatttattatggatttacctgtccgatattcaaagaatttgattttgatgatacgacagaatttgagattgaggtcattgatacatggaatatgacgattgaaaagcagggaacaggaaaaggaaaattccgtgttatgctgccggggcatgagtatatggctatccgtttgagagcaaaggagtgacagaatatgaaagtaggaatcgtatatacaagtacaacaccggaactgattgagacggtgaatacagaattaaacagacagctggggggagaggcagaaattttcaattatgaagatccttccatcctggcagaggtaagggatgcgggatttgtgacagcgggtgcggctgcaagactggtgacgatgtttatgcaggcgatacaggataaagcggaggttgttttaaactgttgttcttctgtaggagaagtcgcagatgcagcggtttctatcggaaaatttacaggagtaccgatcgttcggattgacgaagagatgtgtcgggaagcagtgcgtcttggtgaaaggattggggtattggcaacacttccgacgacgttggagccaaccaaacatacgattgagagagtggccagagaacttggaaaacaggtgactttggtagatggcctgatagagggagcatttggtgtggatcaggagcagttcaaagcactgcttggcaaaacagcagaacagatccgtaatcaggtagatgtgattcttttgagtcagggatctatggcttatgcagaaacgttcttaagcgaaacatatggaattccggttgtgtccagtccgcgatttggcgcagcggcagttcgaagtgcgttggaggcaaaaggatatcggtttgagagacagggggagatgggatgctgacagatacaagacaatcacggaatgcaaaagtgacaccggtagacggtctttccgtgacctggacacggggattgtggaaagagcggacagatacctgcgcacaggcaacagttccacagctgcagcatatgtttgaaagcaaagagatcagtcatgtactggaaaatttccggatttgtgcaggagaagcagatggggagtttgacgggactgtatttggagatggagatttttataaatggatggaagcagctgtttatactgcagcaaagaatcaggacgaggaacttttcaaccagattgattcgtatattgatctgattggaaaagcacagctttcggatggatatctctctacaaagcagatcattggagagcgcaatcagaatggtgttaccagaatgggggatatcaacgatttcgaagtatataattttggacacctgtttacagctgcctgtctgcataaacgtctcacaggcaaggattcttttttaaagattgcagtaaagactgcagattatctggaagggatgtatgcagacgcactggaaaaaggagaagttcagacagcggtatgcccgtctcattatatgggactggtggagatgtaccggaccacgggagaagaacgttacctgaaactggcagagcaggcaattgcattgagagacagtgtgaaagaaggtatggatgataatcaggatcggattccgctgcgggagcatgagaagattattggacatgcagtacgtgcaaattatctttatgcaggagtggcagatctttgtctggaagaagatgatgaggaattaaaagatgtgctgcacaaagtctggagaagtctggtggataaaaaattgtatctgaccggaggatgtggagcactgtataatggaacatctccttacggaaattttttcgtagatcagaaggttcatcaggcatacggatatgaatatcagctgccgaatattacagcatataatgagacatgtgcatcccttggtggtgtgttctgggcataccgcatgtttcagctggagccgaaggcagaatattttgatgtcctggaacggatgatgttaaatacgaaccttgcagctttgagtatggacggaaagaggttcttttatgaaaatatgcttcgaaggacaaaaacactggattacgaactgatctggccgaggacaagatcggagtatattttaagttattgttgtccgccaaacctggcaagaaccattgcacagtccagtgaatatgcgtatctgacctctcaagatgcactgtggattggaatgtacggagccagcagggcaaagattgcattggagaatggagctgcatttacggtgtatcaggaaaccgaatatccatatgatggaaaaatcagatttacttttgaagcgacaaatgaaacaggatttttaatgatgcttcgtattccaggatgggcagaaaacggacggatccaaaatggagagaaacagattgttctgaccagagaaaatgcgggaagttattatgaaatccagatagaagatccgcagcatacagaaatctgtctggatctggaaatgccggttcgctatacagtcgccaataccatggtagaagagaccgtgggacaggcagcagtggaacgaggtcctttggtatattgctgtgagtcggcggacgtttcggtagattcactggatgatatttatctggatccggacgggcaggtgcagctttgcagccagcagattgaaggaaggactgtgacagccgtggagcttaccggatactgtgtaaacagagagggatatgaccggaatgctctgtatcagacattgcggcagactggaatggaaaaagtaaaaattcgtatgattccgtactttgcatgggacaatcgggaatttggagagatgcggatctggtttccggtacttgtaaatcaaaaaaaaacagagcagaaagtacttctgaaggataaaaaaatcgtagtgttagacgatgatccgacgggtgtacagactgtgcatgatgttccggtgtatacagactgggaaatggaaagtctgcagcaggcatttgaggaaaaatccaatctgttttttattttgacgaactccaggagcttttcgaaagaagagacaaaacatgtacatgagacgattgcaaagcagctgcatcaggtatcacagagatgtggaaaagagttccttttgatctccagaggggattctactttacggggacattacccactggagacagaagtgttaagagaaacattggaagaactgggtgaagcaaagtttgacggcgagatcctctgtccgttctttttggaaggcggccgtgtaacgattgataatgtacattatgtaaaagagggaaatatactgattccggccggtatgacagagttcgccaaagaccagtcatttggatatcagtcctcggatctgaccgaatatgtagaagaaaagaccaatgggcagtataaaaaagaggattgcattacgatttctctggaggaactccgtgcaaacgacatcgatggaatcacaggcaaactgatggatgttcatgatttccagaaggtcattgtcaatgcaacgacttatgaagaacttcaggtatttgtacaggcgttcgtgaaagcagcagaggaaggaaaacactttctggcaagaacggcagccagtttccccaaagtactgggaggagtttcagaaaagccgctgctgaaaaaagaagagttagtggaagacacaaaaaacggtggaatcgttctgattggctctcatgtaaagaaaacgacacttcagctggaagctttgaaacagtccgaggaggaattgtgctttttggaatttcatgcagaagtatggaagcacagaaacgggttggaacaggaggcgcgccgggtaagagaagaagcagagcgttgtatccgtctgggaaaaacggctgtgatttatacaagcagaacactccagatgccggatacagaagataaagaacggattctggcggtatccgttgcaatttcagaagctgtgaccagcattattgggaatctggagatcaagccacgattcgtagtggccaaaggcggcatcacatcttctgatgtaggaacaaaagcactgcgtgtgaaacgggcacaggttctcggtcagatcaagaaggggattccggtctggagaaccggggcagaaagtaagtttccgggaatgccgtatattattttcccgggaaatgtaggtgaagtgacaacactcaaagagattgtagaagaattggtataggaggactgggagatgcggaaagtaattgtatcacttgcccctgtgcgtgcaggggatgccgtggatgcaaacgccctggcagaagatgtgaaaaaaagtgtggatgcaggtgcggcgatgtgtcacctgcactgcagaagaccagacggaagtctgacggcagatatttcttatatggaagaatgttttgagacaattttgaaaaagacagatgttgtcgtacaggcttccaccggaggtgtttcggatctgacgattgaagagcgctgcaatcccctgaagtatgaaaaagtggaatctgcttcacttaatggggggagtaccaatctgggggaggctgtatatcgtaactcctttgatgatatccggtactgtgcttccgaagtttataaaagaggaattctgccggagacagaagtatttgatatcggaatgattcacaatatgaaactggtggaggaagaacagccttttgcagagccgaaactgttcaatcttgtgtttggacacaaaggaggtatgcaggcaacaccggagatgctgtccgcatttcgttcctttgttccgcaggatgcgttgtggggagtgacacattttggaagagacaactggacatttctggcagcggcaatcgcgatgggagcaacagtggtgcggattggatttgaggacagcgcgtatctggaagaaggaaaatcagcagagtataactatcagttggtggaaaaagcagtggccttgatacgggcaatgggactggatgtcgcaacaccgcaggaagcaagagaaatcttatatttgaagaagaggtaagcgtatgttaaaaatcagcagagttcacatagattatcagaaaaatccggtgggaatttcagaaatgccacagttcggatgggaaattgcaagtgacaggagaaacgtgatacaacaggcgtatacgcttcaaattgcaaaagatccggagtttacagagcttgtttataacagtggacgggttctgtcgtcccaatccgcacaccttattgcagcgggggaaagactggaatctgttacaaaatattttgtacgggtgaaggtaagtgatgaaacagaagaaacaccgtggaacgaaaccgcatattttgtgaccggactgatagaaggagaagtatggagtgctccatttgtttcagcggagataacagaaacggacaaagaagtttctaagggaacctatgtccgtggaacatttacagtgaaaaaaccggtaaaagaggcttatgcaatgaccacggcgctggggctttatcagttctttctgaatggagaaaaggtcggaaaggatgagatgactcctggatggacatcttatcgccgacatttattgtaccagacatatgaagtgacagatcttttaaaagaaggatataatgtagctggcgccatgctggcggcaggctggtacaaaggagttatggggctgacaaaggcaaggaacaattacggagaccagaccgggtttgctatggaacttcgaattcgctatgaggatggaagtgaagagagaattttgacagatggaagctggaaaggatgtgattctccgactatcttttcagaaatctatcacggcgagatctatgatgccagtctcgagattccgggatgggcatcgaatgagatatcggaagggaactggcatcaaacagcggaggttccatttgatacaggtgtgatccgtgcacagagtggggcaagagtgcaggtgatcgatgaaatcccggcgaaaagactttttacaacaccaaaaggggaacaggtactggattttggacagaatatggcaggaaggattcgtgtgacagcaaccggaaaaccgggagatgtgatctggctgaaatgctttgaagtactggattccaaaggaaatgtgtatctggataatttaagagctgcaagggcagagatgaaatatacatttgcaaaagaaggaaccattacctggtatccaagatttacttatatgggatttcagtatgcacagatcttgtcctgtccgggagaagtgaaagcagaaaactttacagcatgcaccatgcactcggaaatggaaccaacgggaaatattacgtgctcgaatcctctgttaaatcagctgcatcacaattatctgtgggggttaaagagcaatttcctggacgtaccgaccgattgtccacagcgggacgagcgactggggtggaccggggatgcacaaattttctgccgtacagcctgttatttgatgaatacttatacattctatcggaaatggctgcatgatgtggaagtagatcagactccggagggaggagttccccatgtagttcccaatattgaagaggggaaaacagatggaaactggctgcttagtcaaggaccgcattctgcggctgcgtgggcagacgtggcagtgatcgttccgtggacattgtatttgatgtatggggatacaaagattctggaaatccagtacaacagtatgagaggctggattgaatttatgagagaacattccaatgattacatctggaattacaagttgcagtttggtgactgggtggccttggatgcagaagaaggaagttattttggagctaccccgaatgatctgacctgtaccgcatattttgcatattctaccggactgtttgcgaagattgcaagagtactgaacaaagaagaggcagcagattatgaggacttatatgcacatatcgtaaagaagttccaggagacattctttgatgcagaaggaaatataacggctcagacacagacagctcatattgtggcactgtattttgggctgacaccaaaagcttacagggaaaagacagtgaaacgtctgactgaactgctggagaaggaaaacggacatcttgtgaccggatttgtggggactccgtatttctgtcacgctttgagccagaacggacgtgtgaaggaggcgtatgatctgcttttgaaggaagacttcccatcctggctgtatcaggtaaaacagggggctaccaccatttgggaacactgggacggcctgaaaccggacggaacgatgtggagtgccgatatgaattctttcaatcattatgcctatggtgcaatcggagaatggatgtatcgcgtgatgggaggtattgaggcggacgaagatgctccgggatttcagcatgtgatttatgcaccgaagatcggggggaatctgaagtttgtggacacaacctatcattccgtatatggagaaaatcgattgaaatggcaagtggaagaagaatgtgttacaatgtcggtacgtgtgccggcaaatacgactgcaggaatccgtctggatggagcaaaggaagttctggatgcagacgggcttgtatttgaaaagaaagagggatacatgggagcagaagccggatcaggagagtataccattcgttataaaagatgaaacaatagataaaagagagatgcaggaggcatggatatgaaaaacaggttcttgaattgttggaaatggtggaaaagacacaatattcgagaccagattttcatgtccatgcttttcttgactgtattggcaatcggtgtactgggaactgtttcttatcatatggaaaagacgacgatcgaggagaattacagacagtcttatgagaccatgctgaaaaactcaagtaagattttggatttgaaattaaacccgatcattgataaagagcgaagtatattaacagatgtaaaactttgtgaagttctggagagaggacggaaagacggagatcatgagtttacacaggaagagcagaaagctctggagaaaatcctgaccagtattacctttcaggaagaggcagtcagcagtgtggcagtgatggatttttatggacatcatttctttttgagtaatatcaataagggagggctttccttttataactattataaagaacatcgttttcaggacgaaagctggtataaaaagaccgcagaaaatgccggaaaagaagttttctggggacaaggtgtacttggaggtgcagaagacacagaggaggtcatctgctttactaagattttaaacaatccatcaaccggttttccgatgggatgcatgattctgaatctgagcagaagaatgctgggcgagtctattgtggaaggtgatgaggaatatcataccagtgtctatatgatcgtggatgaagcacatgggggaaggcctgtgtatctgaacagtgaggatgcagatacgaaacagcttgtttcggattatttcagtggatctgataaaagatatgtgttcagcagtgctcaaaatgaaacaacaggatggagttttgtaaatgcgatcgccaaaaacgagctgagcatcacaagccgttatgtgagaaatgtagtgttctcactgggcggcattattgtggtattgtcgttcttctttgcaagacaaatttcaaaaagtattacaaaacctctgaaacagctggaaaaagtgatttatgatgtgggagaaggagaacgtaatatttcagaagaatttgatgacagtgaagtgggcatgatcggaagaaaattcaaagaaatggtcaataccaatctggaactttccgagcgtctgatggcggtgaaactaaacgaaagagaagcagaattgttactcttgcaggcgcagatcaatccccattttttgtataatacgctggactctatttattgcgtggcaattatacacggggatgaccagattgcagaaatgatactggcactatcaaataattttaaattgtcgctgaacaatggtgaaaagtatatttcggttgctgattctatacgaagaatcgaagaatatatgaaacttcagaatatgcgttatcaagatcggtttgaattgcatgtgaaggtacagcctgagattatggaaagcaaaatcatttcgtttattttacagccctttatagaaaatgcaatgtatcatggtctggaaccgaagcttggaaaaggcagcatctgggttacagggaaaaaagagggggaaaatttgatctttgagatccgggatgatggagttgggatcgaagatttatcaaaagtagaatccgggtatggaatcagaaatgtaaaagagcgaattcagttgaattatggaacggaatatggagtgatatttgaaagtgaacgtggaaaaggaacaattgtaagaattacaatacctgaaaaagcgaaaggaatggggaaatcatgtatcgattagttgtaattgatgatgaatatatcgtagtggaaggcattaaggcgatgatcaccagaaaaaaactggagtatgaagtggtgggatgcgcttatgatggaatccatggtctggaagtgattcgggagacaaagcctgatctggtcatcacagatattcgcattcccggtatggacgggctttcgatgattgaagcagcgaaagaattttgtgaggatacggtatttgttgtgatcagcggatatacagaatttgaatatgcaagaagagctctgaggctgggggtcaaaggatatattgataagccgatcagtattgacaagctgaatgatgtactcaatgcagtagaaaaagaatgcttccagacgaaggaagaacagtatttgctcgcgatgagcagacaattgacgaaagaattgaacgtaattacagaaaatagcatcaaaagtctggtggaaaaagatgcaggagcattttctggatatgcgaacgaggcactcgaaaaattaaatctgctgtatccgcaacttttggacctgaaacgggaagtttataaatatctgagtgtgctgtgtgatattttgttggaaagcaaaaaaggaatcgacagagaaaatttgatatcgtttcacgagatggaaagcagaaaatcgaaagatgatgtgtttcagtatgcaaaaagcattattttggatcttgaaaagtatcttgaagcagacaagacaaaaagtggacatggaaccattctggagctgctgacttatattgaagcccattataatgaggatatcgggctgaatgaacttgcagacatggtaaagatgaataccgcatatttgagtgtgctgtttaaaagtgaagttggaatgtcctatgtaaaattcctgaccagtctgcgaatcgataaagcaaagaatctgctcaaaaaggggtacaaagtatacgaagtaagtgaaatggtagggtataacaattatcgctattttaccgatatttttaaaaagtatacaggagagacgccaaaaaattaccagaatcatgtatatcatcaggatgcagaataagaagaaagttgtttttcacgaaaaagtgtaaaaaacattttgattccatcagaagaatatagaataaagatatatggaacagatttatgtcattctttcttttctatattccgaaggggtcatgtggtaatgtttcaggaatattttgcggaaattgttcagagactggaacccggttcgctcacagatttcagatatggaaagagtgctggttttcaaaagttcagcagcacgtttcattttctgattctggatattttcgataaaagtatatcctgttgcatttcgtatgatcctctgcagctgacgctcactgtagttaaatatagaagagagttctttgagcgaaacggttttataattggcctgcatatagcgtaaaatatacatcagattccggtccgaagagttcatatggatatgaggacattctacatgttgttcatgacgtcgaaacagattgatgaaaaacagagaaagtaatgtattaaccatctgctttttgtaacgcttctgatgattacactcagtgtaggcccgattgatcagatcagaaagaacaggatcttcgttggtgtggaagaggagataaggaatttctgaggtttgataaaagattcttttgaagaaatcagacagaatcgtatctccttccaaaagtccgaaaaaagattgttcaaaggaacttttccggatcaaaatattcataatgatatcttcgtcccgaaaggcgctcaaagcgtgagttacgccgggagccatgatacagatatcaccggttttcatggaaatgttccgatccagaatatgattgctgcagtttccgtttaatacacagatgatctcaaaaaagtcatgtctgtgccagaaggcagggatatagcgggcatgacgtacaaaagcgatgtccatattctgcacaatgaaaatttgttcattgatttgagaagtcagggcgtttgcgatatttctgtccggcatggctgtgtaggcactaagcaatatgtccataatctcatcctgtgagcagggaatgttcagattccgctcaggtgatttcagatagagctgtttcagctctttttctattacattcaaatctggtatttcattcataaaaaatccctccatccattcccttttaatataacatagaaatgtcgtaaaagatactatgttgtgtcctgttttagacttattattttcatgcaatcatgttagagtaatacaaacggccggaaacaaaagagagagggtatgagatatggatacacatagaaaattaaagtttacggaaaagttatcttatgggattgcagatttaccagaagcagtcaattctattattgcggcatttttaacaatgttctatacagacaatatagggcttgcggcaaccgcggttggtacgatgttttttatttcgaaattgtttgatggtatttcggatattcttgcaggtgtcttgattgataagacaagaacgaagtggggaaaagcaagaccgtggcttttatggcttgcagtaccgactggtctgtcgattgcattgatcttttttattcctcaggatggatcaaaagcaatgcagatgttgtatgcatttgtaacctataatttatttacttctattatgtttacgatcacagggattgcgagaagttctctgttggcgttgatgacgcaggatacgaaagaaagaggatctatggctgcctttggaatgttctttggtctggcaggtacaattctcggatgttcctttacatttccgctgatctttaaacttggcggtgatatccgtgcatggaggattctgtttggagcgtatggcgcaattgttacagcggggctttttgcgggattctttctgtccaaggagtatgttacttctgtggaatcggttgtaaatgaagaagtaaaaaaagtatcttttcgggaagggatcaggctgttttttacaaacaaatatttgatccttgcacttgtggcaaccgtgctggttaattttgtgacacagatcaattcatgttcccagacctatttttataagtatacgatgggagatgagatgcttacaacaacgctgaatcttgtcagtattcttccgattcttgccggaattgtttttctggtaggaccttgcatgcaaaaatttggaaagaaaaaatgtatgtatatcggtatttttggtcagttgatcggaagtgtcatccgtggaatcgcgggaatgaatcagagtatttcgcttctggttgtaggaactgtaatcagcggaattgtaacaggactgcttgcagtaccggtcagtactctgtttgcagacggaatcgattatggagaatacaagacaaaccgcagaattgaaggaatgggatctgctattacaagtttttcccagaagatcagttctggtctggcacaggccagtgtaggatggattcttggtctgaccggatatgtcagcggtgaaatggtacagtccgctgcgacaaatacagggatcatttccatgtatgcgtggatgccggcagtacttctgcttgtgatatttatcattttgaaaatctggtatcagtatgaaaacattgcagacgatgttttgaaggaactggaaaatagaaaagtacagaccgggaaatagaatagagaaggggtaaatggatatgaatatgcttgggaattggatttcgggaaggacaaaatcaccgttttatgcccgcaaagaattttggattgaaaaaactttgaagagtgcatctgcgtctgtgtgtgggcttggacagtttctcttttctatcaatggacagaaagtatcggatcatgagctggatcccggatggacaaactatgacaaaaagatccagtatgtcacatttgatgtaacgaagcttctgcatcccgggaagaatgtgattggagcagaagtcggaaatggctggtttctgaaaaatgatgaacattatacattttcatttccagcttttatgccggcaaatccaaatccttatgcagcatttggaaaagaactggttctggcagtgaaattcgtgttaaagtacgtggatggaacacaggagatcttttatgcagatgagtcttttcaggtaaaagaacatcctgtgaaaatgagtaatgtatacggatcagaaacgtatgatgcagaactggaacagccgggatggaatcaggcgggatttgatacagcaggatggaaccaggccaagatcgtccctttgcaggacgagcccaaaggagaacttgtggaacagtttcagcctgcggtgaaggtgatccggcgctgcccggctcgatatctgtattcggtatccggtcgggagatctatgatctgggtcagaatatttcaggaatgctgcagctcacattccggggaaaaaaaggcgatgtgattcgaatttatcctgcggaaaaactggatgcacagggggatgtggatcagattgcaaaaaattgggggaaggtaggaaactgtattacctgcatcgtcggtgaggattatgtatggcagcaatatcgcatgaagtttacctattttgcggggcaatatcttgcagtagagaagagcagctgtagtgtggaaataaaagagctgacaggagatgctgtttcgagtgcgtggaaaacggacgggacatttcggtgtgatgatcggcgttatatacaaatctatgatctggtggaaaaagcagtagaagcaaatatggtcagtgttcatacagactgccctacaatcgagcgttttgcctggcaggagccgaatcatcttatggcgccttctattatgtatatgaaggatggtcgaaagctctgggaaaagtttttcatggatatgcgtacagatcagctgaaagaggatgattattttctggattttgaaggaaatacattctgtccgggagcaggactgatcccgtcacaggcaccgtgttatattcataatgtgattccggtgcctggtatgggaagcttttttgacattattccatggggaagcgcagggattctgggagtaaaatggcattatatgttttatggtgacaaaaaggttgtccgggataattatgagatgggcaaaaagtatctgcagcatttaaaaaccaaattgaacacagaagggttcttaaatcacggcctcggtgactggggaaatccggataacgagctggcaagagagaatgttgagaccgcatttctttatgcagatgcagtgactatggcagagtttgcacggattctgaaatatgcggaagatgaagcgcaattccttcagtttgcagaaaaagtgaaaaataactacaatgaaaaacttttggttcaggatgaaaccggacaatggtgttatcggaattttgagcacaaagatcgtttggtgatgacccagacatgtgaggcgcttccgctttactggggaatggttccagaggataaagtggaggatgtcggaaaggcatttcagaagacgcttcttgaaaaacaggccttttctgccggggagatcggtcttccttatgtgattcaaacggcttgtgcatatggcatgaatgatgtgatctgcaagtttattaccagtccggaccatccgtcttattatgcttttgtaaaggaagggctgacaacgttgggagaatactgggaggaaaatccgcgcagtcattgccacgatatgatgggacatattatcgaatggtattacaacggaatcgcaggaataaaaccgttggagccgggattcaaaaaggtgctcatcaaaccgtatttaccggaaacgatgaattatatggaatgtaaatatgaatctgtcagcggaagaattcaggtaatccttacgagaaaagacggaaaggtgcatctggagacgcacattgcagaaggaatttcctatgagatagatgagtcgaatttaagagcagacaattgaaaaaatataaattttttctgccagtagaattccattttttcacatgatcccgtgaagagggggacggtttacaccgtccccctcttcaccagcattgtagatacctctgtctttgtgggaggctgtccgggggtatttaaaagatcaatgagcttttgcgcggcggcttcccccatatactgttttggaacatggatggttgtcagtgccggttcgatcacactgcccaggggaagattgtcaaatccgacgattccgatatcctgagggatccgatatccgctttctttgagagcctttatggcaccaacggcgatcagatcattgtctgcgaaatagcaggaagccagctcttcaccatttttgatgacttccagcatatcggcatatgcgccctccatggaaggtgtcaggctgtggacaatggaacgggaagaagacatgccggaagcacggatcgccttgtaaaaaccagaagaacgctctgcaaaattactgatctgataggcagagcgaagatagcctggctgagttttacaagatcggatcaggtgtctggctgcaagatatgccccctgcacattgttgatcagaacgcagttgcagggaactgtttcaaaataggcatccagaagaacaaccggaatcggaagatttaaaaacggttttaaatctccggattccatttcggtgccgagcagaatgattcctgcacagtcagaatattggatttcttcgatctgtttcgtgatcgtatcctcatcttcataaatataactgatcttcagacgatagtcattttttttgcacccctgtgaaatcccttcagaaacctgggagaagaacggggtgtctgcaacaactgttccatgttttttataaataacaaaataaattgccccggaagtggtatgcttttccgcaatccgggaaaaatcatatccatatttttcggcagcatccaggacgagctgccgtgttgccgtactgactccgggtttgtgattgagtgccatggagacagcggcggcagaaagatttaattttctggcaagttcttttgctgtgattcccatatatgatcctttccaaaattctgtttgatgttctgaatttattatgaaccatccataaagaaaaaacaataattaagtaaataattaagtgaaaaacacttaattattgggtgaaattgagtttgtacaaagctatactgaaggaagaaaacaaccagaaaaaagttgaaacaaaaagaaaaatacacaaatacaaagggtatgtgaaaggagacggaatcatgaaaaaaatcaagctgggatttgcaccaacaagaagaagtattttcagtgcaccggatgcaattaagtacagggggctgacagcgcagaggttaaaagaactggatgtagattttgtggacattacggatatcaatgaagaaggacttctgtatgatgataaagatgtagacaaaatcgtagaaaaatttaaaaaagaaggtgtagacgggctgatgctgccgcactgtaattttggaacagagtatgtctgtgcgagacttgcaaaaaaactggatgtgcctgttcttctgtggggaccgttggatgagagaccggaaccaaatggagtaaggctgcgagatacacagtgcggactgtttgcaacgggaaaagtgcttcgaagatttcagattccatttacatatctgacaaactgcagattgaatgatccggtgtttgagcgcggagtaaaagatttccttgcagtctgcaatgttgtaaagacatttaaaaacatccggatccttcagatttccacacgtccttttgatttttggacaacgatgtgcaatgaaggggaactgcttgaaaaattcaatattcagctggcgccggttccgatgacagaactgacagaggaagtgaaagctgttcgtgaagacaaagagaagatggaacagatgatcgcctacatccaggatacgatggtcatcaagatcaaagaagcggaagtagaaatggtagctgctctggctctggcaatgaagaatctggtagagaaatatggctgtcaggcagctgcaatccagtgttggaatgcactgcagacagaaatcggaattatgccgtgtgcagcaaatgcaattttaaatgaacagggaataccggttgtctgtgagactgacattcatggagcagtgacagcacttctggtagaagcagccggaatggacgaaaagagaggcttttttgcagactggacgatccgtcatccggatattgaaaacggtgaacttcttcagcactgcggaccatggccgatgtcagttgcgcaggaaaaaccggaactgacgtatcctctggcatttgaacatccgggaagtctgaccgcagaggcaaaacacggagacgtgacactgtgtcgtttcgatggagacaatggagaatattcgcttcttcttggaaatgcaaaaggagtagacggaccaaagggaatgggaacctatctttgggttgaagtagagaacatcaagcgtctggaagcaaaaattgtagaaggaccatatatccaccactgtgtcggaattcataaaaatgtagtacctgtactttatgaggcatgtaaatatattggagtgaaaccggatctttatgatccgatcgaagaagacgtaaaagcatatctgcgcggtgagtgagagaaaggaaggaaagatatgaatttaaaagcattggcctatcaattaagaagagataccatagatataatctgtgccggaaaggcgggacatatcggcggggatatgagcgtaatggaaattctggtggagctgtattttgatcagatgaatattgatgccaaaaatccggaagatccggacagagatctgtttgtattgagtaaaggacactctatggaggcatattatgcagtgctttcggaaaaaggatttttaaataaagaagatgttttgaaaaatttcagtcagtttggttccaaatatatcggtcaccccaataataaacttccgggaatcgagatgaattcgggttcccttggtcatggacttccagtctgtgtgggaatggcaaaagcagcgaaaatggatcataaagactgccgcgtttatgtcgtgatgggagatggagagctggcagaaggctctgtctgggaaggcgctatggcagcacgccagtataagctggataatctgtgtgcagtggtagacagaaaccgcctgcagatttccggaaatacagaagatgtgatgggacacgatgatctgcacgaacggttcagaagttttggatggcatgtgatcgatgtaaaagacggaaatgatatcgatgaactgcatgctgcatttgaagaagcaaagtgcgtaaaagaaaaaccgactgtattgatcgcaaatacagtaaaaggaaaaggttcttctatcatggaaaataaggcaaactggcatcataaagttccgacaacagaagagtatgagacaattatgaaagatttaaaaactgcagaggaggcgttgtcataatgggaaaaacagcaaataaacagatgatctgtgaagtattgatggaagctgcaaaagaagatcaagatattgttgcgctctgcagtgattccagaggaagcggatcttttacaccatttgcagatacatatccggagcaattcgtagaaaccggaattgcagagcagaatctggtcagcattgcagcaggactggcaaaatgtgggaaaaaatcatatgcggtttctccggcctgctttctttctacaagaagttatgagcagtgcaaagtagatgttgcatattccaacacaaatgtaaaactgatcggaatcagcggtggaatcagttatggggccttgggaatgagtcatcattctgcacaggatattgcagcgatgagtgcgatcccgaatatgcgtgtttatattccaagtgaccatgtacagacaagagaattgacaaaagcactgttaaaagatgaaaaacctgcatacatccgagtgggaagaaatgcagtcgatccgatttatgaggaagaaaatgtaccgtttgaaatggatcacgctaccgttgtaacggaaggaaatccggatggaaacgatgtggcgatcattgcatgtggggagatggtaaaaccggcgaaagatgcagctgaaattttgaagtcggaaggaatttcggcatccgttctggatatgtactgcatcaaaccgctggatgagaaggcaatcgtacgtgcggcagaaaatgcaaaagcagtgatcacagtagaggaacatgcaccatttggcggacttggatctatggtggcacaggtggcaggaagggaatgtccgaaaaaagtggtaaatatgtctcttccggatgcaccggtcatcacaggaacttcaaaagaagtatttgattactatggattgaatgcagaaggtattgtgaacaaagtaaaagaaatcctgaaataggggacaggagagaaagacatggcagaaagctatattatcagcattgatcagagcacgcagggaacaaaagctctgttgttcgatcaggagggtgtgctgctccaaagaaacgatcttccgcatcggcagatcgttaatgaaaaaggatgggtgtcccatgatccggaagaaatttacaggaatactgtgcaggttgtaaaaaatctggtaaaagattccggaatttcaaaaggatgtgtcaagggaattggaatcagcaatcagagggaaacctctctgatctgggaaaaagaaactggaaaagcattggcaaatgcagttgtctggcagtgtgcaagggcagctgatatctgccggcgtgtagaacagaccggggcggcagagaagatccgaacgaagacagggcttgcactttccccctattttccggcttcgaaactggcatggctgaaagaaaatgtagagggtgcgaaagatctggcagaaaagcatgaattatgtttcggtacgattgatacctggcttgtgtacaaaatgacacatggagcatcttataaaacggattattccaatgcttcacgcacccagttatttgatatctttgagaaaacctgggatgaagaaatctgtcagttatttggattggatgcacaggatcttgcagaagtgtgtgactcagacagttgctttggagagacggatctggaaggattttttgaaagtccggttccaatccacagtgtattgggagattctcatggtgcactgtttggacagggatgtctggaaaaaggaatgatcaagtccacatatggaacaggctcttccattatgatgaatatcggagaaactccggtattgagtacccatggagtggtaacctctcttgcatggggaatgcaggggaaagtcagttatgtgctggagggaaatatcaattatacaggagcagtgatctcatggctgaaagatgatatggagctgattcagtcaccatcagaaacagaagggctctgtcgggtggcagaagcagatgacagtttgtattttgttccggcatttacagggcttggagcgccatattggaacagtgaggcaaaaggagcgctgacaggaattacaagaaccaccagaaaagcagaaatggtgcgtgcaggagtagagtgtattgcatatcagatcgcagatgtggtcaatgccatgagccaggatgcgaagacggagatccaggagctgcgtgtggacggcgggcccacaagaaattcatatctgatgcagtttcagagtgatattctggaccggaaagttctggtgccggatgcggaagaactctccgggattggagctgcttatgcagccggaagaggactggggctgtatggagatgaagtgtttacgcgtctgaaacgtcaggaatatgtgccgaagatgtgtgaagacacaagaactcgaaaatacaatggatggaaagatgccgtaaaaattgtgacaaatagtaaaaaatgagaattgtttttctgttttgaatatcgtatactttatcagacgaaagaagctcactggggactacggtaaaatcggtcgggcataatagcaccaggcatagagagtgaaaggggtgaagtatatggaaagagatatgacggtcggaaatccgacgaaggtgattcttaattttacaattcctctttttatagggaatgtatttcagcaattatataatatggcagatacgattattgtcgggagatttgtcggggcagacgctttggcggcggtaggatcgaccggaacgatcatgtttttgattcttggattcctgcaggggatgacagccgggtttacagtgcctactgcacagaaattcggagccggtgatatgaaatctgtcagaaaaaccgttggttctgctgcaattttgtctttgatcgtatctgcgatcatgacggtgatcagtatggtcgggatgaggtggctgctgcggtttatgaatacaccggataacatctttgaggatgcatatcggtatattatggtaatctgtgcggggatttttgcgcaggtgttatataacctgctggcaagcattctgcgtgccctgggaaacagtaagactccgctgtattttctgattctggcggcaggattgaatatcgtactggatctggtatttattattgtatttcatatgggaacagcaggagcagcttatgcgacagtgactgcgcagggaatttcgggggtattgtgcctgatttatataatcaggaaagttccgattctgagactgaaaaaggaagattggaaactggatggaactttggtgaagatccagtttggaattggatttccaatggcatttcagtattctatcacagcgatcggagcgatgatgctgcaggtttctctgaacatacttggttctgtggcgattgcgggatttacggcagccagcaagattgagcagttggtgacgcaggcatatgtggcattgggaactaccatggcaacgtattgtgcccagaatatgggggcaggaaagattctgagaattcggcagggatttaaaagtgcaacatggatgggatgtgtctacgcagtcgtgacaggagcttttgtgatatttgtcgggaaatacctgaccccgctgtttctgtcagagaatctgactcagatcatggattatgtagatatttatctgaagtgtgcaggtttattctttatcccgcttgtttttgtgaacgtttatcgaaatggaattcaggggatgggttttggaatccttccaatgatggcgggagtggcagaattgattggaagaggcgcagttgcgattggagctgcacggtacgaaagctatgtgggagtctgtatggcaggaccggttgcctggattttggcaggaggattgttgcttgcgatgtattttcttattatgaaaaaatatccgggagattttgcaagtcaggaatgacttgcaagatctcttgttttataggttgatgaatatgaaaaaacctcagaaactttcgtctctgaggttctcttagaggcgcagaccggatttgaaccggtgaatcagggtgttgcagacccacgccttaccacttggctactgcgccttatttaattgatagtccgaagactaatgactccaacgggaatcgaacccgtgttaccgccgtgaaagggcgatgtcttaaccgcttgaccatggagccttgctgtatcactgcttcagtgatgaccgagttatatattagcatagctccataagaattgcaagcctttttttgaaaaaaaattattttttttcaaattttctttctggtctattatatgaccggattctttttcgtatgacagatcgggagaaactttatgttgccgccatccaaagcgcctcgcggaaggccagaaaaaatccaggcatactgtttcagcagcctggattggaatagtaatcttacataaaaaattcttttgcagcttttaccagatattctgtatcttttattccggcagtttcatatggagaatgcattgccagctgagggagtccgatatctacggtgttgagcgcaacttgtgtattggaaatattgcccagtgtggagccgcctgccatgtcggaacggttggtaaatgtctgatatggcacctcagcctgtttgcagagatctttaaacatggctgcggaaatgccatcggtgcagtatttctgattggcattgtatttgatcacgattccttcgttcagatacgggcggttgacaggatccgccttctccgtgtggttcggatgcacggcatgtgcattgtccgcagaaatcatataacttttggacaatgcgatcatataatcctgaggatccatagcaaatatcgtacagatgcgagacagggtgtcctttaaaaatgtggatgcagcgccctgttttgttgtacttcccacttcttcgttgtccagaacacagtggacggcaacggcctgttttcgttcggcctcaaggagtccatagagggaagcacaggcacactggagatcatccagacggggagcagagagaaattcattgtttgcaccccagatggttcccttttggcgattgtacaggaagagatcatgacttaagatggactcttttttgacgcctgcatattctgcaatggtgtttaagaaagtattctttgcagaaatatctccgtacagcggaagcagatccttctgtgcgttatatgaatatccgctgttggcatcccggttcatgtggatggcaagatttggaatcagaagaagatctctgtctgcgttgatgagttttgcatgataggcaccatcttctttgacaattacacgtccggcaattgagagagggcgatcaaaccagggtgcacagagcattcctccatagcgttctacatttaatttgatataatgctcttctactgcaatttccggattctctttgatcttgaagcaaggagaatcactgtgacttgcgatgatatgaaaaccattctggagcataacggattccggaatggaaaaggcaatgatggatgatccgtttcttgtaacaaaatagtcaccgcccggtgttaaattccacttctgatcttcagacagttctgtaaatccatgttttgttaaaatatcttttgtagtctgcactgcatgaaagcagctgggactgttctcaataaattccagtaaatttgttgcgatggtattcgacatacgtttttcctccctatatgcatgaattatgtctattttagcacgagggtgcggcgttgaaaagagtcagagattctgttaccataaagaaaaaagaaatcataaaggaagaggcgaggttaatgcggattttagtagcagaggatgaaaaagatctgaatcgtctggtaagttccagattaaaggcagaacattacagcgtggactcctgctttgacgggcaggaggcattggactatctggcaggagctccttatgatgcggtgatcctggatattatgatgccggtgatggatgggctgagtgtgctcagacagctgcggcaaaaggggagtcaggttccagttcttcttctgacagcaaaggacaggatcgaggatcgtgtcaatggtctggatgcaggggcgaatgactatttggtaaaaccatttgcatttgaagaactgctggcccgtatccgtgttcttctgagaaacccccgggagataccgcagacggtctgcaggctggatgatctggaagtccatttggatacccatcaggtgcttcgtgcagggcgtgagatcaaactttccggcaaagaatttgcgcttctgcgttatatgatccaaaatgtggggattgtactttccagagatcggttggaacagcatttgtggaattatgactatgtcgggggttccaatgtgattgatgtgtatatccgatatctgcgcaaaaagattgatgacggagcacagacgaaactgatccataccgttcgtggagcgggatatgttatgaggacagaatcatgaaacgattttcattgaaattaaaactgacagttatgtattctttttttatgctgctggtaacctgtatttgtcttgggattctcttctctcttagtggaaatgaaattctgacttctgcaaagatgcacctgcgggaacgcgttcatgaaagtgcagaagagattgagctggaagacggggaatttgaaattgattccgagttttattctctgaataaaaatgtgtatctggcactttatgatgcagagggacacttcttatatggaaaggttccaccagggcttgacgaaatgctgcagtttcaggatggccagattcagacgatcagaaaagcagcggggcagtggtatgtgtatgatgtacagtatgaaatggaaaacggacaggagttttatgtccgaggcagcatttctgtcacagaggcacagaaggaatttcttctggcagtgcggattgcagtgattctaatgccaatgatcgtgattttgactgcgttgatcggatatcgtctgattcggcgtacactgcttccggtacggcagatgacagagacggtacaggagattcaagaagacggagacttaagccgcaggattggagtcagttcggataccgggaaagacgaattttatcagttggcaggaacttttgacgggatgttggaaagtctggagcaggcatttcgcagggagcggcagtttacatctgacgtttcccatgagcttcgaacaccggtcagtgtgatcctggcgcagtgtgatgcgtcattggatcgtaacgacttatcggatgaacagagagaagaaattcttctgatccggaaaaaagcaggagaaatgtcccagatgatctctcagcttctattactgtcgagggcagatcagggacggcagcagctcaataaagaagaaatcaatatcagtgagttgacggaaatgatcgtggaagagcaaaagattctggcacagaagcggggaattcaggttcatacagagatagaagcagatttgattggatatttggatgagtccttttatatccgtatgctggataatctgatctcgaatgcagttttttatggaaaagagggaggaaatatcaaagtgtctctgcatcagatggaatccggggttcgaggaacggtagaagatgacggaatcgggatcagcagagaagaacaggcgcatatctgggagcgattttatcgggcagatacttcacggaccggaaaggaagatggtacgcattccggtcttggactttccatggtaaaatggatcgcacaggcacatggaggagatgtctgggtggagagtgagctcggaaaaggcagctgctttacatttgagttaaaattctaatcttattttaatcttcatggaatatattattcttacaaacaaagaataacagtgtagaaatgcaattgatagaaagagaggaattaaaatatgatgaagaaaagatattttgcagcagcggcagtttgtgtggcagcaatgagtatgtttacgggatgtgcaggtaatagaggaaaagacattggaaaagatgcagcgaaaacagcagcattttcagatgcaggtgtgacagaagatgagattacaagactgaaagtaagcaaagaccacgatgatggaagaagtatttatgaggttgattttacagttgcatccacaggagatgaatatgattatgagatttcagcagaagatggaagtatacttcaggtcgaccgggaaatgggaaaaggaagtgtgaatacaacacaggaccagacgcagaatcagacgcaaagtcaggagcagacgcaaagtcagggtacaactacgcagtcacagccggcgatttcagaagagaaagcaaaaaaccttgccttggaaagagtgcctggcgcatctgcacaagatctgagaatgcagttggaatttgacgatggaatccagaaatacgaaggcgatatcgtctatgatggaaaagaatatgattttgaaattgatgccaacaccggaacatttttggaatggagtgaagaacggattggatagaaagggagagaagaagatgacagggttaagcacattatgctatatcgaaaaagatggaaaatatctgatgctccatcgtacagtaaaaaagaacgatgtcaataaagacaaatggattggtgtgggcgggcattttgaagcggatgaaagcccggaggagtgtctgcttcgagaagtgaaagaagagaccggatacacactgacgtcatggaaatatcgtgcaattgtgacatttgtatcaggggatggtgtgacagagtatatgtctttatttacggcggatggatttacaggagaacagatcgcatgtgatgagggagagctgaagtgggtagataaaaaggagatcgagaatctcaatctttgggaaggagacaaaatattcttccgactcctggaggaatcggaagaattcttctcattaaaactggtatatgacggaaatggaaagctgctgaaagcaatcctgaatggaaaaccattgtagttttttaaaccagatagcaatacatgacaataaagtggcaggcgcttccggccatgacaaagagatgaaaaatctcatggcttccgaaattcttatgtttattgttgaaaatcggaagctttagtgcgtaaataataccaccgatcgtataaatgatgcctcctgccagcagccagccaaatgcggcgggagacagggagtgaaaaatctgtgtgaaggccagtacgcaggtccatcccattccgatatagagaatggaagatacccacttcggacagtacacccaaaaggctttgatcagaataccgatcaaagcgattccccatacgatcgaaagcaaaatcacaccagtgcgtccgttcagtgtaatcagacaaatcggagtgtagcttcccgcgatcaggataaagatcatcatatgatcgattttttttaatacagtatttactttggcagaaatatcaaatgtatgatatgttgtactggcagcatacagtaaaatcaggctgatcgcatagacagcaagagaaatcaggtacactctgcctggttcgcgggctgcttttatcaacagaggaatcgcgccgcagattgccataaccataccaataaaatgtgtgatcgcgctgccggggtcttttaaatgttgagctttgttcatcgatatcttcctccttaaaactgaaaagtcacatgtagttttaaaaactacatcaagtatatgtgtatattacaccttgtattccttgaatgcaagtatttttaaaaaattttatacttaaagaagttttgacagaaagagaaaattctgatatgatagttcagattgtattgtggggctgttgcacagtcccctatttttgttttcagaaaaggagatttatggaagaattaaaatttgaagagttagagctttgtcctgagatattaaaagcagtaaaacatatgggatttgaagaggcgtcaccgattcagtcaaaagcaattccggtcattatgagtggaaaagatgtgatcggacaggcgcagacaggaactggaaagacagcagcatttggaattccgctcctggaaaaaattgacccgaagaataaaaaattacaggcgatcgttctttgtccgacaagagagcttgccattcaggttgcagaagagatccgaaatcttgcaaaatatatgcatgggatcaaagttttgccaatctatggagggcaggaaatcgtaaagcagattcgttctttaaaaagtggcactcagcttgtgatcggtacgccggggcgtgtgatggatcatatgcgccgcaagacgatgaagatggatcacgtgcatacgatagttctggatgaggcggatgagatgctgaatatgggatttcgtgaggatattgagacaatcctggaagggattccacaggaacatcagaccgttcttttttcagcaaccatgccaaaggccattttggagataacaaaacagttccagaccaatgcagagctggtaaaagtgacgaagaaagaactgactgttccgaatatcgagcagttttattatgaagtaaaaccgaaaaacaaagaagaagtactttccagacttctggatatctatacaccgaagttgtcggttgtattttgtaacacaaagaagcaggtggatctgcttgtgaatgcactgcttggaagagggtattttgcggcagggcttcatggagatatgaagcaggcacagagagatcgggtgatgcagggattccgttccggaaaaacagacattcttgtatgtacagatgtggcagcaagagggattgacgtggatgatgtggaagcagtatttaattatgatctcccacaggatgatgaatattatgtacaccgaattggcagaaccggacgtgccggacgcgtgggacgttccttctcctttgtatccggacgggaagtctataaattaaaagaaattcagcgttactgtaaaaccaaaatttatgcgcagaaagttccgtcattaaatgatgttgcaaatacaaaaatggaaaatgtactggaagagatcgagcagatcatggaaaatgaagatctgacgaagtttctccagattatcgaagaccgtgtcaatgaatctgattatacagcaatggatctggcagcggcatttttgaaatactgttccggacaacaggagacagaagagaacgatatggagtttggggataccggagcggaagaagccggaatggtacgtttatttatcaatatcggaaagaaaaataaagcaaaaccgggagatattgtcggcgcacttgcgggagaaagtggaattccgggaaaactgatcggaacgattgatatgtttgacaagtatacgtttgtagaagttccgagagaatatgcacgcgatgtgctgaatgcaatgaatcatgccaaaattaaagggaaatcggttgcagtagaacccgcaaatcaaaaataactcaactggactggttaaaaaacatataactggacgttttcatccatccactttggtgataggataagaccatcaaatatgaaaagagggaaaatgatggaaaaaagaaaacagacagttgtaaaattggcacagacagcacttttagcagcactttgttttgtatcatttacatttttacagattaagattccgatgccgggtggagatgcgacatctcttcacattggaaatgcattctgtgttcttggagcattactcttaggcggatggtatggcggactggcaggtgctattggcatgactatagcagatgtattggatccgatttatatagtaggtgccccaaaaacttttgttctcaagctttgcattggcctgatcgtaggacttgtggcacatcgcatcgggaaaatcaatgaaagcacagataaaaagtatgtttttcgatggagcgttcttgcatctgtcgcaggacttggatttaatgtgatcgcagatccattggtaggatatttctacaaacagtatattttaggacagccgcagcagatggcagaagtacttgcgaagtggagtactgcaaccacatttgtgaatgcagtggtgtctacgattttagtagcagttttgtacaatgcattgcggccggttcttctgaaaagcgggatactgcagattgcaagaaaaacagaagaagtaaagatttgagaaagaaaatctccctgacttcagtgaattttttaaaattgccgacgtcggggagtgttattatttcgtaatcgtattgagttctgtgttgatcaaatcaataagctctcttggaattccaagatttttgagttttcctacagcttctaaggtcatcattttcatcatgtcaaatttggggtgttctatcatctctccaaaatatttggagataattttttcgccttctggatttttcatgatgtcaccgattttatcggtactggagaagcaattcggatcaagcttgattttatttatttgtgtcaggtcaaatttttcaaaccagttaatgacgctgtttccgtcttcttttttgatatattcatagtttttatctttatcttttacgcgatataaagtcatcacatcgtggtacacagtaccatgctcagagtatcctttgacggctatgacattttttcccatcagaagaggaatatcatcaaatgtcgtcataggtaagatgtttgatgattgagcaataaggtggttatttacatacaattccagtttttcaagattggagagtacggtaatggagttcttttctttgtgacgattcacgaatctgctaccggcgagtttgacaaaagattctttggaccagtacgctttgtataaataaaatgcgtctttttttatatttcggtcaatggtcaaaagtcctttctggttttgcccctgtttaccgccttcatctcggttggcactgccaaaatcacacatattccacacataacttcctacaaaatagtcacgttcttcaaaagcgcgaagtgcattatctgagaaaagcaactgatattcttcagaataatcttttgtttttggttcataagagtgatactgtgggtttgtatcaacaccatattctgtcaccatgagtggtatattaggacatgtggcatggaatgaatccaagcgttcttgaagtcctgtcatagtgtcatagtaccatccataatataagttatagccaaccagttcagtcagtctgttgatcggactttcatttgcaacggaatagatgtttgcttctgcagtatatctgtgaggatccagagctttcgtgtatttggacaattcttctacatgatcataaatttctggggtttctccggcaatggtaatttcattttgcacaccccaacagtatacagaagtgtgatttccgcattgcaaaatcaaacggcgcatttgttctttgatattgaatttagcacattcattttctgaaataatactgataaacggaacttctgcccacacaaggagtccttcttcatcacagcgacgataaaaatagtcatcgtgttgataatgggaaagccgtacagaatttgcccccagctcttttatgagtcgaatatcctgttccatttgagtttctgaaatagcatttccaacaccggcaaaatcctgatgtcttgcgacaccgcgcagttttacgtgtttcccatttaaaaagagcccctgatctggtgtaatctgaatggttctaaatccgatggcaatgctgcggtgttctatgactttcttgtctgtacaaagttcgatggacaactgatgaagataaggatcatccgttcccatccagagatgaggatttgtaacattcaggcataagcgaaacatattttgctcttggaaatacgctgttgttgtgtgttgtgcgatgacttgattttcatccagtagagtggcacggatttctccatgacaaggttcctgatgattgattacacatccctcaatggcgacctcccaagtattgtcttctaatttctgtatatgaattcgaacaccgtcacgacttccatccaggtagtcaaagtgcaatttgggtgcgcaaataattcgaacatttcgatagagtccaccatagaaagaaaaatctgccatttgtgggtagacggcatctgttggcgagttatctgttacaatagtaatttggtttgtgccggatgacacgaaatcgtttaatgcaacgcgatataaagaatatggacaggtgttggtgtgaacttcctgattgttgatggatactgtactaatcatggaggcagcacctacctcaaggtagatgtcctgctccagatcagattctgtaagagtgaactcatttgtgtaaaaaccttttccacgccacatggatgttccattttgtccatctacggcattgtaagtatgaggaatggaaattgtttctgcgttttcgttttctttgtgaaaactccagttatcatttaatagaatttctgacaaatcggaacctcctttgattctaagcattttttgctttctttttttctaagatagctttttctccatacatttgtgtatactcttcatctgtaatatggtatcgtttcaaagcaatgatgcttgcaagatctccaagaagaggtgccccaagatacatggcaattgtagcgatatacagagctgttgtaggttctgcacctgcgctgtatccggcaagtcccatgaggataccaacaatagaagatccaaatgcactgataactttgtctacaagtgaaaatgtagcaccaataaatccaggcatgaattttccggtttttagcttgtgatagtcgatgatttccgcaatcataggatctacgttctgtgcagagaatcttctaaacagcatattggcagacattaaaataataaataccaagatagttgcttttccgaaaggacggaaaataatcaagattgcttccaatgtgaagtttgcaattgcgccgattaaagaagctcttttgcatccgaattttacagcaacagaacctgcaacgaaggctccaatcagtgacattggagtagagatgccaccaacgattggctgcagatccagatttccaacagcatagatatagaaataggtcataactgccgtctggatcgtggacgcaattttatctgtggatgcagcaaggatcaacatacgaagaggctgattcagtcgcagtacattgagactgtctttaattgaaattttctcttcttttttatctggatcctggcgatagaattcaggcttatctgttgcagagattgcaaacagacatccaagcagaagaactgcatgaaggacaaacgcactgataatgattagagtccagcccttttgggatccaagaccaccatttttctgcagaatcggaacgatcagtgttgtcatgatcaaaccaagcattgtagaatagcagccgccggcaataccggatagtggacggtatttcgggttttttgtaacgatagaaaggacacatttgtttacggttgtcataaaagtataaccaatgacccagattgcataccagagaattacccaaaccatacgataagattgtggaatatcgaatgagaacaggtaaatcataaagctcgcaaatagcatgatcagggatccgattacaaggaacggacggaatttaccaaatcgcgtttcagttctgtcgataatagaaccaataattgggtcagtaattccatcgaaaattctcatgacggtcatgataatgcccattgctgtaatattcagtcctaatgcttctgtactgaatacgagaaagaatgacatgttcaacatattgaacacgtttgatgctgcagaaccgagcggagtcataacgacacggacagcttctgcttttgagttttttgcttttgtactcataattttcctccaataacttttgtttaaaagtattatagttggaggattgtaaaaaattcacatataaaacaaagattttattattcttttttaaggtttttttgtgtttttcgataattatatggagatgttccgtatttttgacgaaaacatttgtaaaagtaggcttcgtttgcatatcctatatcagatgtgatttcttcgatttttcgattggtgtttctgagtaggtttgctgcttctgtcatacgaatgtctataagaatatctttaaaccccctccctgtttctgccttcagtagagagctcaaataattgggatgaaagcacatatgttttgcaacagattgaagggtagcatctttgtaatgctgcttcaaatagtcaaatacctcgttttgtatttttgagtgtttctgttggattgttttttgatcttcagatcccacagcgcgagaaatctcggtaaaaagaatcaaaagacaggaaagtatttttcctttgtttctagggctttctaaaaagtattcacaaaggatctgctccatcaatgtagattcaaaactgtttttaggaagatgatacagaatgtagttcttctttttgctttcagagtacaaactgttgatgatatagtttgaaatataattatcctcggaaagtaggtacataaaaatggtatcaaaaaaatcggctgtcattaaaatgttaaacatccaagtatcatgtccgattttttcggaggaatggattacatttttgttcattagacaaatatccccggaagacattttaatgggaataccatcgatttccattgaaacttcaccatcaagcatgaaacaaagctcaatgtattcgtgacgatgcctgggaatccgaatatttttatatttcgggcggatgacaaaacgtttttcttgtacatctttatttggataagaggtgacaatgttgttttcatctgtatgcatggagagttctctggattttaaaatctgtttttccagctttgtttcttctgagcgaagatattgttttagttgctcataatttttttgcatgaatcagactccatttctgaaagaagagttttgtttgtgatgtttttattgcaatatatcggatgtaatatatcggataaagaaaaaccacaggaaaccctctgtagcaaagattttcctatggttttgtttccatttttatctaggcgtgaatgacagttccggtcttgcctttgagcgcatcgttgatcttatcataagatgtgatcagagcagtacgcccttctctttcctctacaaagtcaacagcagcctggaatttcggaagcatattataaacaccgaaatgtccttgttccatatattcttttgcctgtgcagctgagatctctcccaacttttcttcgttgtcttttccaaggttgatacatacctgttctacacttgtcaggataatcagctgatcagcgtctacaccttctgcaagttttccggcagccaggtctttttcgatgactgcacttgcaccttttaggtggttatcctgttccagtacaggaattccgccgcctccggcagcaatcacaacctgatccgcatccagaagtacttttactgcatccaattctacgatcttcacaggatgtggagcggagactactctacggaatccttttcctgcttcttcaatcacatagtttccttttttacgttcttcattggcttcctctgcactcatataacgtccaagcactttggttggtgtgtagaaagcttcatcgtaagggtcgacgatcacctgtgtcaacacagtgctgacagtacgatagatgccacggttcatcagttcttcccggattccattctgaagatcgtatccgatatagccctgactcatggcagaacatacggacattggcgcagcagtataattctcatgacgctgtccgaattcattcatagcagtatggatcattcccacctgtggagcgttgctgtgtgtgatcgcaacctgaaatccggcttcaattaaatctgcaattacttttgctgtattttttactgcgactttctgctctggtaatgtagtaccaagagcgcgatgtcccagtgcaacgacaactcttttcttcatagtcatatccctttcgttaaataaatgtgatgaataaattatattatctttcgtacaaaaaagcaacgctattccatgcagaagttgtggattatggataaaatgcaaacaggatatccagtgccatcaacattccaagaagtatacatacgcaaaacagaaaccagtgaggaatattttttatacttcgtttccattttggtgcaataaaatactgacaggcacatccgatcatccccagaaatacggcatctgccaaaaacggaggaagcagagagggacgaaaatactgagaaagtttctgcagatctgcgtgccagatgatctgaagtatcacgtcggaaacatagctgatcaccgaatataagagcccgtttaggcaaaaggacaaaatcggttgtctggaaaatcggtgcagcagtttcagactcaggactccacacagaccataaagaggaatccatggaccaaatagaatactccggtttaaaaagaccccttccataatcagataactcagtgtttcaagaatccatccgaggacggaaagcaggaaaaataaagaagcaagggtcagtggagaataggcatccgtaggattcagcggtgggcgcacagcgcgtacaggtggctgaatggagtataaaaataccgggtattgctgaggttcaaaataggaaatttttgtatacggcccttcggaatcatcgtaaagcgctttgcggatgaggagttcatctgcagcaagttcccgctccagaagcggatcgttgaaaagttcatagcgtggagcacgacagcggatataatgtttacgcaaggtcatatacaattctgcatcagcagcagtccggtatggattgacgagtagaaaatccagaatgccgagagtgaaaaaggaaagaatactccacccaataaaagaaagatgaaggaggaacctcttccatttgtttccccgcatgatctgccgggataaaaagaaagcatcctctctgctgattgccggattttctgccagaatatatgggatcatgctgtattcatattttttgacgattcccccaatgatcgtcagattccagagtgcctgaaagatcgagcggcaggtcatcacccaggcagggcgggcaagatagttcagtttataaagaaagaaaattttactgatcaaagtccgtttataggtacgtgcctccagaaaaaagcgggcctctccgatgagaagaatattctgaataaaaacggtataaacaaccgataatacagcacccagaagaaacaggaaaaaggatggggaaaacgggtcatgaaacgcctcgttcactgtttttaagacagaaaaaagaaacgatcttccactggtgtagatattcacaatctgctcaaacaacgtcgtaaacggagaactggaaagtgaaatctgaaatacatggtggagtgtgtctgttacgatggaagaattagaagcgtctgaaaaattcagatgtgtctgaataaaaacagtctgaagtccagggcgaaactgccggaaaacaaaggtggaagaggcaaaggtggttgtcaaaagagcaatcagaaaacaaacagataccattctttgataactgctttttaatgatgtttttgcctgttgtttcaatgtttttcttgtccacatgtcatggagccctccgattcctgtgatagccttattatagttgcttcccggcagactgtcaaagaagatttgtgccttgtcaacagaactggaaatctgttagaatttaaattggttgaaattgtaaaaagggagatgaaaaagtgggaaagttgattccttatttgaaaaactataaaaaagagagtgtgatcggacctctgtttaaattactggaagcggtgtttgagttgatcgtgccactgatcacagcgagaattattgatgttggaattcagaatggagatattgtttatatatggaagatggcagctattctggtggcttttggtgtattgggtcttgtgtgttctctgatggcacagtattttgcggccaaagcagcggttggttttggtaccgagcttcggcatgatctgttctgccatattgagcagctttcatatgcagcagtagatcaggcaggcagcgcaacactggttgtcaggatgacgagtgatatcaaccaggtacaggcaggggtcaatctggttctgcgtttgtttttgagatctccgtttattgtggtcggtgctatgatcatggcatttacaatcaatgtgaagatggcgttgatctttgcgattacagttccgcttcttgcacttgtcatctatagcattatgattctgacaattccattatataagaaggtgcaaaaagcattggatcaggtactcgtttctacaagagaaaatctggcaggaatccgtgtgatccgtgcattttgtacacagggcaaagaagccggggagtttgctgcaaaaagcgaaagtttgatgaagctgcagtttttgaccgggcgtatctcggcgcttttgaatccggtgacttacacgatcgtcaatgcagggatcattgcagtggtctggtatggaggagggcaggtatatgaaggcgccctgacgcagggagaagtgatcgccctggtcaattatatgtctcagattcttctggccctggtggctttggcgaacttgatcatttcctttacaaaagcgatggcatctgcggcgcgtttgaatgaagtatttgctctgaagtccgaattgaaagacggaaatgaggaacaatcagcaaaaacagaagccccgaaagtacggatggagcatgtgactttttgttatccgggaagccaggaggcagcactggaagatatttcatttactgccgaaaggggagagaccatcggaattatcgggggaaccggttctggaaagacaacgctggtgaatctgattccgagattttatgacgcaacagaaggaaaagtggaaattgacgggacagacatttctgattataagatcgaacatcttcgggatcggatcggagttgttccgcagaaagccgtgttgttttccggtacgataaggagtaatttgcagatgggcaatgaacaggcatccgaacaggaaatgtatcgggcgctggagatcgctcaggcactggattttgtagaagaaaaaccagggaaattaaatgcttctgtcagtgaaggcgggaaaaatctgtcgggaggtcagaagcagaggctgacaatcgcgagagcattgatcaaagaaccacagatcctgattctggatgacagcgcatccgcactggattttgcaacagatgccgcactgcgcaaggcgcttatacagaatacagaacatatgaccgtatttttggtgtcgcagagggcatcttctgtcatgcatgcagataagattctggtgttggatgatgggaagatggttggatacggcacacatgaaacacttctgaaaacctgtggagtttatcaggaaatctgccggtcacagttttcaatagaagggggggttcagtatgcatagagagaaagaacgtgtatggagaaaggtactttggctgatccggccctatgtacattttttgatgctgtcactggtgtttgcgataatttccgcagtattgacactgtatgctccgattctgatcggaaatgcagtggacctgattcttgcaaggggaaatgtagactttgttcagataggaaggatccttttgaaactgggaggtatcatccttgtgacaagtgctgctcaatggctgatgaatctgtgcaacaatcatattacgtaccgggttgtcaaggatgtccggataaaagcatttgccaaactgcagaaactcccactaaaatatgtggacagtcatgcatatggagagacgatcagccggatcatcacagatgtggaacagttttctgacggactgctcatgggatttacacaattttttacaggagttgtgacaattctcggaacgctggtctttatgcttgcgatccatgtgaaaattgcgctggtggtgattttgatcacgccggtttccttgtttgtggcaagctttatcgcaaaacgaacctatacatttttcaaggcacagtcagaagcgagagcacagatgacttctctggtagatgaaatggtggggaatcagaaagtagtgcaggcttttgggtatggagaccgggcagtgaaacagtttgatgcggtgaatcggaagcttcaaaaagttagcctgcaggccattttcttttcttctattaccaatcccagtacccggtttgtaaacggactggtgtatacgggagtcagtattgtgggagcatttacggcaatctcgggagggattacggtagggcagctgtcctgtttcctaagttacgcaaatcagtatacaaagccgttcaatgaaatttccagtgtggtgacggagcttcagaatgcattggcatgtgcgcggagagtatttgattttatagaggaaaaaccggaagagccggatgcggtatccgccttagaattgaaacatgcagacggcagcgtggagctggaacacgtcagtttctcttatcattcgaatgcagaacttttaaaagatctgaatctgcaggtaaggcccggacaaaagattgcgatcgtaggaccgactggttgtggaaagacgacgctgatcaatcttttgatgcgtttctacgagattcaaagtggagaaatccgcgtcagtcagacgggaattcaaaatattacaagagacagtctgcggaccaattttggaatggttttgcaggaaacgtggctgaaagccggaacgattgcggagaatatcgcatatggaaaggacgatgccacaagagaagaaatcatcgaagccgcaaaggctgctcatgcacacggatttatccggcgaatggagcggggatacgatacacagatccaggaagaaggcggcaatctgtcacagggacaaaagcagcttctttgtattgcaagagtgatgctcagacttccggatatgctgattttggatgaggcaacctcatcgatcgatacgcgtacagagatgaagattcaggaggcttttcacagtatgatgaaaggacgtacaagttttatcgtagcacacagactttctacaattcgggaagcagatgtgatcctggtcatgaaggatggaaatatcattgagcagggaagtcatgaagaattgttgggaaaaggcggattttataaaaatctgtatgaaagtcagtttgcatcttaaaaagcccggggagactatttgtttccccgggttgtcatatatgcgtgttcacgttttaattctgtcagacagtcctttgcgagccagtgctgattagtcggtgtaaggatcgctttgtatggaaatggaccggctccgctttttttcaatgccagaagtgcctgatccagtttctgattcgaaagtccgcagaatacaatcattgtatcagagagttcttctccgtcatatcgttctttcaggggtgtcatatccggaacatttgcgagtacaccaaggggctggttataatcttcgcgtgcaatgtgacggatccgtacgcgaagtggaagaagcgcgcgatctactttctttttgatgtcagggtctgatatgtggaataataaaatactttctttcatataaaatctcctctccaatcgttttgtctgcatttattgtaatggattttgttctgtaagaaaagggcagattataaaatatctattgacgggtatgaagaaaagaaatataatcattgtattaaaaaaataatacaataatacgaataggagacagccgggaggaagaatatgattgaaattaaaaatctgaccaagacatacaagctgaataaaaagcagatgaaagaatccagaacgacagatcccattaaaattgcagtccatgatcttacgctgactgcaaaaaagggggagatctatgggctcttagggccgaatggcgcggggaaaacgacaacgctgcgctgtatctccacgatcatcaaaccgacgaagggagagatctatgtggacggtcacgaagtgtgtaaagagcctgaaaaggtacgggagaagattggatttttaacaggagatatcaagttggatccgcagttttctccggactatatgtttgattttttcggcaagattcatggagtgaaagaggagaagctcaaagagcgcaaggaagaattgttttcttatttcgggatcaaagagtttgcacataaaaagatgaaagaactgtcaacaggaatgggacagaaggcagcgattgcagtcagtctggtacatgatccggatatcattatttttgatgaaccgacaaatgggctggacgtagtgactgcgcggagtgtgacagattacctgaagcgtctgaaagagcagggaaaacttgtgatcatttctacccatatcatgtcagaggcggaaaaattgtgcgaccggatcggagtgatcatcgatggacgtaaggtgatggaagggcatttggaagatattttgagagagacacagacggaagatctggaggatgcattttttgaactgtatcgtcaggaaaaaggaggcggggaagatgcgtgagattttactgatctgtaaaaaagaattatccagagtgatgacggacagaaagatgttgttttcggtatttcttttgccggcaatcattatggtagttgtgatgaacctgatcacaagcctttcggaaaatatgatggatgatgtcagaagtcatgcgccgattgtctatctggaacaggctcccgagggtgtgacagattatttgagaatgtacaatgaaaaaatggaacttcgcacagtggaggacaaggaaaaagtagaagcggagatccgcagtggagaggcagatctctggatcgcatttccacagaactttctgaaggacattcaggcatatggagcgggagattccattccgcagatcaaggcctactacaatccgtcggaagagtattctcaggcagcgtatgaaggggtggccgggggatgtctggaggcttatcggcaggcacttttggcagaacgcgtgggagatatgcagtcattaacggtctttacagtgaactccgacaatccggatatggtgatccaggatgagcagaaagcaggaggaaaagctctcggcatgatgctgccgtattttgtgacgattttgctgtttgcaggagccatggggatcggaacggatatggtggccggagagaaagaacgtggcaccatggcaagtatgcttgtagcgccgatcaaaagaagttccattgtgcttggaaaggtatttgcactgatgattatttccggaatcagttctgttgtatatgttgcagtcatggtgggattcctgcctcagatgatgagtgcttatgggaatggcgggatggaactgagtcttggaatggagcagattctgatgatggcatgcctgcttgttgcgatcgcatttttatattccggaatcattgtattgatctctgtgtttgcaaaggatgtaaaagaggccaacagttatatcatgccggtgtatatgctgatcctgatcctggggattgtgaccatgtttacaacacaaaagattgaaggatggtattatgcagtgcctgtgtttaatacagcgctggcacttcaggggattcttacgggggaagtgagcgtgatccagtatgcaatgacgctggcagagacattgcttctggggcttgttatgatagctgtaattgcaaaagcatttgaaagtgaaaaagtaatggcgaaatagacgatataaaaactgtttcacacggaatgggtgcctgcatatagtaacagtaagaagactgttgctgtgtgcaggtatttttgcctcattgacagaaggacatccggaaagcggggatggagtatgagactgtgtgagctgcgggaaaaagaagtaatcaatatatgtaactgcaggagacttggatgtgtggcagatgtggatattgatgtctgtgatggaagagttctggcgatcattattcctgttcccggaaaaatttgcggaatccttggaagtgaaggtgagtatgtgattccatttggatgtatcaaaaaaattggggcggatattattttagtagaaatctgcgaagaaaagtttttgcaaaagtattagatgttggttataatggggaaaagaaaccaaatgcaaaggaaaaagaaaggcggaaacgagtatgaaatgtccgtattgtggtcatccggatacgcgggtgatcgattccagaccggcagaggataataacgcaatccgaagaaggagatcctgtgatgaatgtggaaaacgatttacaacgtatgaaaaagtagagaccattcctctgatcgtgatcaaaaaagacaataacagagaacagtatgaccgttccaagattgaagcaggagttttgcgggcatgctataaacgtccggtttcagcacagcagattcagcagacaattgatgacatcgaacttcagatttttaaaagagaagacaaggaaattccaagcaaactgatcggagagatcgtgatggatcgtttgaaagatctggatccggttgcctatgtccgatttgcatcggtataccgtgaatttaaagatgtcaatacatttatgtctgagttaaaaaagattctggagtagctgtatgcggacatataaactgacgatcgcctatgatgggagcaggtatcagggctggcagagacagagtaatacagagaatacaatccaggggcttttggagaaggctgcttccaaagcggcaggatacccgttggaggttcagggatcaggccgtacagacagaggggttcatgcaagaggacaaacagccagcatcgtgctgcatgggaaaatacaggaagctgattttttaaacaccatgaatgagatgcttccggatgatatcagagttaccggggcggaattggtaaaaaatggattccacgcgagactcagtgcggttggaaagtgttatgaatactggatcgataccagagaaaagccggatgtgttccaaagaaagtacacgtatcattatccgaaaaaactggatatagaggcggtgaaaaaagcagcagaatatttgacgggacgtcatgattttgcagcttttaccgataaaaaagaggaaaagtccacaattcgtacaatttatgctataatcgtggaggtacagggggacaagttaaggatcgagtaccagggcagtggttttatgtatcatatggtaagggttctgacaggaacactgttggaagtcggagatggtaggcggacgcctgaattggtaagaactgcgctaataagcggaaaccgggcagatgccggatttcttgcacctgcaagagggctgacattaaaagaggtatattattagatttagggggctggtacgaaagtagacggtccctttttggggttttcccggaaaacaggaggatttatgaagctgatatcatggaatgtaaatggaatccgtgcctgcgtacagaaaggatttttagagttctttcgggaagcggatgcggatattttctgtctgcaggagacaaaacttcaggctggacagattgagctggatctggaaggatatgagcagtattggaattatgccgtgaaaaaaggatattccggaaccgcagtatttacaaagaagacgccattggatgtgacttatggaatcggaattgaggagcatgaccaggaaggccgtgtgatcacattggaatttgaagaattctttttggtgacagtgtacacaccgaattcgcagaacgaactggccagattggattaccgtatgcgttgggaagcagactttcttgcatatctaaagaaactggaagagaaaaaaccggtgattttctgtggagatttcaatgtagcacaccgggaaattgatctgaagaatccaaagacaaaccggaaaaatgccggatttacggatgaagagcgggggaaatttaccgagcttttagaggccgggtttatcgatacatttcgatatttttatccggatcaggaaggaatttattcctggtggtcatacagattcagtgcccgggctaaaaatgccggatggaggatcgactatttctgtgtttcagactgtttaaaagaccggcttgcggatgcaaagattttgacggatgttatgggatctgatcattgtccggtcgagctggatttaaaataaaaaaggagagagataagatgacaaagattgatattatttctggatttttaggagccggaaaaacaacatttattaaaaagatgctcaaagaagcattccagggagaacaggttgtacttattgagaatgaattcggagagatcgggattgacggtggatttttaaaagaagccggaattgaaatccgggagatgaattccggctgcatttgttgttctttggttggagattttggaaagtctttaaaagaggttgtagatacgtatcatccagatcgtattctgatcgaaccatcgggtgtcggaaaactttcagacgtcatcaaggcagtacaggacgttcagaacgagattgaagcagagttgaacagttttacaacggtggtagatgtcacgaaatgcaaattatacaaaaagaatttcggggaatttttcagcaatcagattgagtatgcaggtgcgatcattttgagtcgtacggataaggcgaagcaggaaaaagtagaagagagtgtggcacttcttcgcgggctgaatgaaaaagcgccgatcatcacaacaccgatcgagcagttgtccggagagaagcttctggagacaatggaacacagtaagacattggaagaagaactgttgatggaagaggagatctgtccggaatgtggacatgttcatgaccatcatgagcatcaccaccatgaagaccacgagcatcatcaccatcatcatgaagaccacgagcaccatcatgagcattatcacgatggagagtgcggatgcggctgtggacatgatcacgaccatcaccatgaagaacatggacaccatcaccatcatcatgcggatgaagtgtttacaagctggggacgagagacgatccggacatatacaacagatgaaatcaccaatatcttaaaaacattggaagaggatgatgcatatggaacggttcttcgggcaaaaggaatggtagcaggtgcggatggagaatggatttattttgatatggttcctcaggagcatgaagtcagaaacggagcggcagagtatacgggaagaatttgtgtgattggttctcagttgaaagaagacaggctggaagaattgtttggattgaaaaaatagaaattgcggacaggagagagaagaatgaacgaaccagatgtaatggtctatctgatgaccggatttttggacagtggaaaatctcagtttttaaaatttacgctgacacaggattattttcagattgacggcacgacacttttgatcctttgtgaggaaggggaggaagaatttgatgttctggaaatggcaaaacatggagtgaagatcatcaaaatagaagatcagcaggagctgacagaagcatttttgaatgagctgaacgagacatatactcctgagcgagtggtgatcgaatacaatgggatgtggaaagtcagtgattttgaggcgatgaagcttccggaaggctgggaaattgaacagaaactgacaactgtagatgccagtacatttcagatgtatctgaacaatctgaaaccactgtttgtggaaatggtgcgtggggcagagttggtactgttcaatcgctgtacggatatcgagcctctggcaggatatcgaagaagtgtaaaagtagtcagcccgcaggcagaagtgatctttgaggatgaaaatggtgagatcgagaatattttcggggatgatgtgccgtatgatctgaatgcgcctgttattgagattccaagagaagattatggaatctggtatgtggatgtgatggaaaatccggacagatataaggggaaagttattgaatttacagcaaaggtattgaaaccgaaaggatttccgtccaaggtgttcctgccgggaaggatggcgatgacctgctgtgcagatgatacaacgtttctcggatatatctgcaagagtgcatatgctccgaagctgcaagccggacagtgggtgaaggtacgggcaaaagtgcagtacgggcatgtatctgtctatagaggagcagggccgattctggaggcagagcatatcgaggaggcagaaccaatcgaagaactggtttattttaattagcagaaagaggaagggaaaacagatggaaaaaagatttgatgtaattgcaatgggagaacttctgattgattttacgatgaatggtcagagcgaacagggaaacaacctgttcgaggcctgcccgggcggggctccgtgcaatgtactggcgatgctgaataagcttgggaagaagacagcgtttcttggaaaagtgggcgatgatcagtttggaagactgctgcgggatacgatcagcagtgcggggattgatgcgtctcaccttcttacagatcaggaggtaaatacaacacttgcgtttgtacatacatttccagatggagaccgggaattttcattctatcggaatccaggcgcagacatgatgcttcgtgcagaagaatttgaggaggatttcatctgtcaggcaagactcttccattttggaacgctgtctatgacacatgaagcggtaagacaggcaacgaaaaaggcactcaaagcggcaaaggagaacggtcttcttatttcttttgatccaaatctgcgcccaccgctgtggagttctttggagcttgcgaaagaacagatggagtatggattccagtattgtgatattctgaaaatttcggataatgagatccagtttgtttcgggaaaggaagattacgatgagggaattgcgtatcttcaggagaaatatcagattccgctgattcttctgactatgggaaaggacggaagtcgtgcctactataaaggaatgcgtgtggaaagagcaggaaaaacagttcaggcaattgagacaacaggagcgggggatacgttctgcggaagtgctttgaattatattctagagcatgattttgaaaatctgaccgaagaacagcttggagaaatgctgtcgtttgcaaatgtagcagcggctctgatcacaacgaaaaaaggagcgatccgttccatgcctgagaaagaagaggttttggaatttctgcaaaaataaaaaactgctttctttttcctgataaatagtgtacaatgaatcggcagtacatgaagatatgggaggaatatacaatgccggaagcagtagcagaagaattgtgtgtgaaatttaaggatatcgatgaaatacaggagtttgccagagcagtgaaccagtttcacggagatgtagatctcaggcagggaagaactacgatcgatgcaaaatcccttcttggcatctgcagtatgaagatagaagaagagatggaactgcaggtatttaatggagaggcagaggaactgaaagaattgatcgtgaagtttcttgtttaagtgaagcatacatcgacaatataagggtattttccagctgttggaagataccctttttcagaaagagaggacaggtcagaatgaaatttacaaagatgcagggattgggaaatgattatgtatatgtgaacggatttgaagaaaaaatagagaatccttccgagctggctgtaaaaatgagcaatcggaattttggagtcggttcggatggtctgattttgatcaacccgtctgaaaatgcagattttgaaatggaaatgtacaatgcagatggatccaggggagagatgtgtggaaatggaatccgttgtgttgcaaaatatgtctatgattatgggcttacggatcagacgcatatttctgtagagacgcttggcggaatcaaatatctggatttgacggtagaagatggaaacgttgttttggtgaaagtagatatgggaagtccgattctgacaccagagttgattccggttattgcagacgaaaaagaagcagtttccattccgattacagtggacgaaacagaatatcaaatgacctgtgtttcgatggggaatccacatgcggtgatattcatggatgatattgaacatttgaaaatcgaagaaatcggaccgaagttcgagaaccacgagcgttttccaaacagagtcaatacggagtttgtaaaagtattggatcgaaagactgccagtatgcgtgtctgggaacgggggtcaggagaaactcttgcctgcggaacgggagcatgtgcggttgcagtggcatgtattcttggcgggtatacagaagataaagtgacagtcaaactgttgggaggcgatttactgatcgaatgggatcgagaacaaaataaaatctatatgacaggtccggcagaggttgtatttgatggagtgtggaaggcataacataagaaaaagtgtctgttatggtttgcctcgggctgctgtcagacctgaggtgaaccgcagctgttttcaagctcaatcaccacttatatgtgtgcgatcgttgtgcttgtgcgttttggttttgcactttgctgaaaaagtttaaaaaataaaaaaagtgcttgactttttaaaaaaacgcgatataatataaatgttgagtctgacaaaaatgaatgatgcggattggtgtaatggcagcacagcagactctgactctgttagtagaggttcgagtcctctatccgtagcttgtaagacagtcattgtggctgtcttatttttatgttttttgctgtgttactgtgtacagtaaaaagacaattttcattatcttttttagagaaaaaaacattgacaatcaaatacaaagcgaatataataaaacagtatgacataaggagaaacagcttacgccaaagccccggagtatgctgatttcatatagaagaattaaagaaaataatctatgataattaataagcaggaggaacacccatgaaaacttatatggctaacccagacaagatcgaaagaaaatggtatgtggttgatgctgaaggatgtacattaggacgtctgtcttcagagatcgctaaagtgttaagaggaaaaaataaaccggagtacacaccacatgttgatacaggagattatgtaatcgttgtaaacgctgacaaagtgaaagtaacaggaaagaaattacagcagaaagtttactacaatcactctgattatgtaggtggaatgagagagacaacactggctgaaatgcttgcaaagaaaccagaaaaagttgttgagcttgctgtaaaaggaatgcttccaaaaggacctttgggaagagcaatgatcaagaaacttcatgtatacgctggaccagagcacaacaatcaggctcagaaaccagaagtattgacattttaaggaaaggttgaaaggaggacattacattggctaacgcaaaatattacggaacaggaagaagaaaaaaatctgttgcaagagtatatcttgtaccaggaacaggaaagattacaatcaataaaagagatatcgatgagtatcttggactggaaacattaaaagttgttgttcgtcagccactcgttgctacaggaacaacagataaatttgatgttatcgtaaacgtacacggtggtggatacacaggacaggctggagcaatccgtcacggaatttcaagagcacttcttgaagctgatgctgattacagaccagtattaaagagcgctggatacctgacacgtgatccacgtatgaaagaacgtaagaaatacggtctcaaagctgctcgtagagcaccacagttctctaaacgttaattatacgttttcggaacgtacaatttcaaaaaaaagatttttcgactcctcaggacttcggtcttggggagtttttgtgtgtatttttaaaagcaaatgtgataaaataattgtattacaaaatattggagggcgaatcatggaacaaacttttttgacagatattaaaataaaaaaagttcgtcatttagagaatatttcaattcctttagataaaaataaaaggaaacatttgattttaacgggtaaaaatggaagtggaaaaacaagtgtattggaagagctagtacagcattttaattatattctttcagatcgatttgatagctatgatgagctgagggaaaaacagagattctacatagatagaatcgaaaaggcagagaaaatatctgatttggaaaaaagaagaaaatccatacaagaagaaaaaaaaatattagagtggatagaagatagaatgaaaaattggttggaaggagttgtttcaaactttacttcctatatggtattgcgtgaaaaatatcaaaaggggaattttatttttgcatactataaagctgaaagagaatttcaagtggaagaatacaaaaatatcgaaaaaatagaatttcaggataagtatagtattgctgaaaatccaggtataaaattcacaaaatatcttgtagacttgaaagctactcaagctttcacaaagaataaagaaaaaaccgaaaagatagataaatggtttcaggcatttgaagatattttaaagaggatttttgaagatgaaaatcttcggttaaaatttaatgatgaaacatttcagttttctatctgtgagacaaatagggaaccttttgattttaacacaatgtccagcggttattcggcagtatttgatattattaatgatttgattataagaatggaggcaaagtctggactgcgaacggaatttgatatggaaggtgttgttttagtagatgaaattgaaacacatttgcatcttgaattgcagaaagagatattgcctattttaacaaaactttttccgaatatacagtttgtgattacgacgcattcgccgtttattttaagttctttggacgatgcagttatttatgaccttgaagataaaatactggtagaaaatggattgaagaacttgccatatcaagggattgtagaaggatattttaaagctgatacactatcagaagaactaagagaaaaatttgaaagatataaagatttggtttctaaggatgagctatcagacgaagaatatgaagaaataaataaactggagttctatttggatgatgtcccagattatcttgcaaaagaactgacatcagaatatagtcgattgaaattagaattcgcaaatagggggtaagaacggtgattaagatagagagaaatcctgttccgcctccatcattggctatcgaagagcaaaaggcgcacggggtttataataagccagatgtaatacagagattaaaagaagattcgcacgataagtgttatatttgtgaattgggagggttatctgatccggaggtagaacatttaaaaccacatcatggtcgtacaataccagagaggatttttgactggaataatttgttttatgtgtgtccgcattgtaacaatataaaaaaagaatcaaaatatgacgatagaattatagattgctgcaaagaagatccagaaaaaatgttagaacagtgttatgaaaaaggtcatgtaaatgtacataatattgtgtatgaagagcgggcgattatgactgctgaacttatacaggaatgttttgaaaaacgcaataccgggattcgggaagcagcatgccaacacagagttgatcgcttggcagatgagatgaacattttatataaaacattggaaaagcataagagaaatccagaactattgcagtataaaagaagtttgcgagccacattaagtagaagtagtatatttgcagcatttaaaagaagttatgtaagaaaacatattaaggattatccagatttagaagaatttttagtgtgatttgaggtgttctgaggagtaatgagaagtcctgcgtttgtaacgtgtttgcaacaccatattccaagaatccagtaaaatcaagcgttcccagttacccaaacgttaattatacgtttcggaacgtacaatttcaaaaaagatttttcgactcctcaggacttcggtcttggggagtttttaatgtgtattccttttaaatagaatgatataatctatatagaatttatagtctggttattgagggagattttcctaagggcaggaaaatcgttgaatgaaagaatttaaagagtcgttagcacaactatggtttcctttatgatagatgaaatggtaaattggtatggaattaagaatattgcgctactttctgacagtagcaaaagaacaaagttttacaaaagcagcagaacaattacacatcacacagccaactctatccagacagcttgccgcatttgaggaggagttaggcatcactttgtttgttcgcaaagggaaaagtatgatacttacagatgaagggattttgttaaagagaagggcgttggaaatccttaatctggaagaacgaacgctggaagaactaagaggaacgaaagaagtgatagagggaacagtcacttttggctgcggagagtttacagcagtagaaacattggcaaagatatgcaagcgctataaagaaaaatatccccttgttcagattgcgattcatactgcaacagcagatactatatatgagaaggtgaataaaggtcttgtggacattgcattattcatggaaccggtagatacagaaggatttgattatatcaggatgaaagacagtgaccattgggtagtaggagtttgtcctgatgacccgcttgctgataagaagtacatagagaagaaagaccttttggataagcctcttattttaccagaaagggtgggggttcagagcgaacttgcaaattggtttggaaaagatttttccaatcttgatatttcatttataagcaaccttggaacaaatgccggcgtgatggcggcaaatggacttgggtatccaatatctattgaaggagctgtaaaatattggcaggaagatcttcttgtgcagagaaggctttatccggaaattactgcgaactgtgtgattgcctggagaagaaatattccttattcgcaggcggtaaataagatgatcgaagaaatcaatgcctatgatgaaatcattttaggatttccaatctggtggtatgtagcaccgacaatcataaatacttttttagaaaaatataatttttcaggtaaaaggatcattttgtttgctacttccggtggaagtggatttgggaatacggcaagagaattgcagacttctgcaccggacagtgtgattacagaaggaaaggtgtttcataacgtagtcaaacagcaaattgctgaatgggcaggaacattataagattggagagatattacggtagtggcgttgatgtcttctggtattacagatttttctttgaaattctacttactttttgatttacgaagggaaggtgcaaaaaatggaatatgtgaaattaggaaatacagagatcgatgtgtcgaaaatctgtttgggatgcatgagctttggaaaagccggaacgatgcatgactggacacttgatgaagcagaaagtgaaaaagtgatcaggcatgcgttgaaacttggaatcaatttctttgatacagcaaatggatattcagcaggaacaagcgaagaatatctcggaaagacaatcaagaagaatatagcaagagataaggtagtcattgcttcaaaagtatattttaatgaaggacgtttatccagaaaagcaattatgcgggaaattgaaggtactttgcaaagactgggcacagattatcttgatttgtatattattcatagattcgattatgatacgccgattgaggaaacgatggaggctctgcatgatttggttaaagctggaaaagtaagagcaattggtgcgtctgcaatgtacggttatcaattttacaacatgcagcttgtggcaaaagaacatggatggacgcagttttctgtaatggaaaatcattataatcttctttatcgagaggatgaaagggagctgattcctatttgtaagcagatgggcgtttcgcttatgccgtatagtcctttagcagccggacatctaaccagaccagaatggagtacagattcattacgcagcaaaacagatagagtggcaatggggaaatatgacggtatggaaaaacaggatttgaagatcgtggagagagtatatgaactttcgaagaaatataattgcaaaatgtcccagatcgcacttgcatggcagtggatgaaaggcatttcttcaccgattgtcggtgctactaaaacaggatatcttgatgatgcagttggagctttgcatgtaaagctgacagattcagatagggaatatctggaggaaatgtatattccacatccgattattggggcaatcagtcataatccagaacagggggttatactgcttgatgagaaaaagtaaagttagcagttgtatattcctcggcaactgataatcccaaaacggcagtggaataaattgcagggcaaattttgaaatggatgatgaaacttcaagttctctaaacgttagtcttagatttttggtgatgtgacaggaaaataactgtttgatattgaccgattgtttgattagtgataaaatcccatttatagactaggtggtctataaatggggttttatgaaacgaaacagtgcttttgagagtgtaggtgagcaaaatgaagaaacatgaaaacgttggaagagaatctttgctggcttctgtaaaaccatcgaaagcaattgttgatctggcagttccggcaacacttgcattattggctaaggctgtttataacattgtcgataccgcatatattggaatgttgaacagtgatacagcgcttgcagcagttggagttacactgccgttgcttctgattatggtttccgtagagaacatatttgcggcaggagcaggtgttttagcgggcaggcaattgggggaaaatgataaggaagaagcaaatcgcaccgtcacaacgattgtcggattttccgtgatgataggaatcggattatgcgtagtcgggctcctgtttatggaattattattgaaggcatttggtgcatctggtgcagtgcttccgcaggcaaaagaatatgcattttggatgtttattgcagcacttttcaatttgccggcacaaagtctcaattgtgctgcaagggcagaatcttcggtgaagatttcttccatagcagtgattactggtgcagtattgaatgtgattctggatccgatttttatgttttcctggggactgggcatgggagtagaaggagcatcacttgcgacgactatttcacaaggagttacatttgtcattctcctgggcttttatatgggcggtttttccgtgattaaggtgaaaccaaactactttaaactttccggaaagtttatatgggatgtggtttccatcggaatccctacagcagtcattcagatctgtcttgcggttgctacttcgttgactaacattgcagccaaagcacttcctgactcggatctgatcattgctgcatacggggttgtccagcgtctggttttaatcggatgttatgtaatcatgggatttatgcagggataccagccagtggcatcctatgcttttggggcaaaaaataaagaacgttttgatcaatccgcaaagtttgccttgtggggttctttgttattgactgttgttgtagcagcagtttacattctgttgtcaaagccgttgattttattgtttaaccagaatccgctggtagtggaatatggaaaatggcttctgatctcacaggtggcagtatatccggcatttggtctgtgttatatgatgacaatcacatttcagacgattggagcatcgaaaatgggactgtttttgtcgcttgcccggcaatgtttgttttatgttccgtttattctcatactgccgggaatgacaggagtaagagggatttatttttcacagcctgcagcggacattttgacgattattgtgtgcgtatttctgataaaacctatgaagcgcaggatttcggaaaaaatgaaataaaaagtgcagcacagattattttaaaagcgtatggaacgcataactgataagtaaggcgaggaatagaaatatgatatctttattggtaagactactagcagcaatcatacttgcattttttgcaggaaaacttatatccaagatcaaactgccatctatattgggatggctgatcgcaggaatgattttgggaccccacgctgtgtcactgatgaatcagcagattctggatgcacagtggtaccagacgatcgtgcacattttagagtgtgcagttggtctgatgattggaacggagcttgtatggaataaaatcaaacgttccggaaaagcaattgtaatcacaacatttacacaatcagtcgggacatttttatttgtatcacttgtttttggaatcgttttttattttcaggatattccactgtatctggcatttctttttggtggtattgctttggccacagcaccggcaccggcactttctattgtgcgtgagttcaagacaaacggaccggtaacaaatacattgattccaatggcagcgttggatgatattattggatgtattattttctttacaacaatagcaatcgtagcaggaaatctttctgcaggggaattgccggcatatatgattgccctggtggtgatacttccgttggtcatcggtattgtaacaggtcttttagcgggtcttatgctgaaaaaagagagaggttctgcggccacgttatgcctgctgattttgaacattctgatcgcatcgggagttggattcatatttaataatctggtgatgccaaaacctgttttgaattttatgttgattggtatggcattttcagctactttttccaatatgatcacagagaaacgtctggaagaaatcatgcatgagttcaatccacttctgggaattgcaatgattattgtaatcctgaatttgggagctccgcttgattaccacttgattatgggagcaggattgtttacgctgatttatattgcagcaagagcgcttggaaaatattttggagcttattttggagcaagtattacaaaatctccgaaaactgtgaaaaaatatctgggatttacacttttgccacattctggcgtatctcttgtatttacggggattgccgtatctgtattgagtgtgcctgctccggaatatgcggggattattcagggaacaatcgcagcagctgcagtaatcaatgagatcattgccgtgattgttgcgaaaaaaggatttgaatgggccggtgaatttgagagtgatattccggctgtcagtacgattgaagaaggaaaaaaatatgcggtcattacaatcagcagacagcatggaagcggaggacgcgaaattggaaaacagttgtccgaacgtttggggattccgttttatgaccatgaattgattgaaatggcagctcagtcctgtccgatcgatcaaacatttttcgaaaatgcggatacaaaatggacaggaagtttctggcatgaattgggagaaggtgtgaatcatgacctttctctgaatgataaggcatttttgcaccagtcttccgtgatccgggaaattgcaaacaaaggcggttgtattattgtggggcgatgtgcagattatgtactgaaagattacgcaaatgtattaaaggtttttgtatatgcagatttggacagccgaaaagaaagaatagaacatatatacaaagaagctgatgaaaaggcgctcagcaaaattcaaaaaacagataaaaaacgggcatcttattataaatattataccggtcagaattttggggaagcaaaaaattatgatatctgtttgaacagcagtcttttaggaattgaaagatgtgtggacattatacaatcgacatatgactcgattgaagatatggaaaatcccataatcgagaatcaaatatcgaaagaaaattaaaagagaaaatcagaaataatctatccagaggcatttagcgaataaaccgctaaatgcctctcaattctttaaaaacagcatcatattcctgcgaaaagatactgtctttattccacagaaaggtgaagtcatgcataatcatgaaatcagacagtggaatctgcactaacgttccttcattcaattcttgttccactgcagatttatagagaaaagaaattccgcaatcctcttttaacagagtgacgatcgtgtggatgttttcgatttccacaagatgttggaagtctttgacagacatatttttcaatgccagtgttttggtcaggattgcccgggtaccagagccgtgttctcgaatcaggagacgttcggatgtcaggtcccggagattgtgtactggttttgaaaatgtgtgatgggcggaggcaacagcaatgtattcctctgctttgtagacacgtgtctcgtaatgatcaccgctaaaatatccttccacaattgcaaaatcgatcgttccctcgtgaagataggtgagaagggtctgcgtgttgccatatcggatgtgaaaatccatatccggatgtgttttgataaaacgggaaagagcaggtacgatcgcatattcgccaatggtcattgttacgccaaaggtcagaacttttttcccttctacactttcctgcatccgtttttttaacgtattttcatcatttctcatggtttctagagcagagcgtaagatttctccggcaggagttagtctgagctttttcttatctcttataaaaagttcggtaccgtaggtcttttccagatgtttgatatgctgggaaactgcgggctgtgtcagattcaggtgcccggcagcatgtgtaaagttcatatcgttgcatacagtcagaaatgtttccatgcgaaaatccaacataattgtttctccttttgcagatgtgtttatacctaaaccataacaaatatttattatataatcaatacttataattttacagaatgataaaagagatttatagtatatatgaaaacagggaaaagtaaaatgaagaaggcgaaaaacaggaggcaaatatggattttataaagaaaaacgggaagggagtacttttttgtctggctttggcaatgccatcagctgttttgggaaagttgtttccggtcatcggtggaccagtgtttgcaattttaattggaatgatacttgcattggtgattaaaaaacgggattcactggagtgtggagtaaaatatacttcgaagaaaatattgcaatatgccgttgtacttcttggattcggactcaatttggaggttgtgatggagacgggaaaacagtctttgccgattattgtgtgcaccattacaacatcattggtgatttcttatattttgcatcgcacaatgaacattccggaaaaaatctctacactggttggggtgggatcttcgatttgtgggggatcagcgatcgcagcaacagctccggttatcgatgcggatgaagaagaagtagcacaggcgatttcggtgatttttttgtttaatattctggcagcgttgatttttccggtactgggaacagcgcttggattttcaacaacatccggggaagcatttggaatttttgcagggactgcggtgaatgatacctcttctgtaactgcagcagcttctacgtgggacagcatgtatcatctgggaagccagacactggataaggcggtgacagtaaagctcaccagaacattggcgattatccccatcacattggtacttgcattacgcagggcacggaaggctgaaacagaaagcggagaaaaagtgtctctgaagaaagtgtttccattttttattctgttttttatcggagcaagtctgattacgacagcagcaacagcagtaggagtaccggcagaagtttttcagccattaaaagagctctccaagttttttatcattatggcaatgggagcaattggatttcatacggatgtagtgaaattgatcaaaggtggtgggaaacccatcttaatgggaatggtatgttggttaggcattacagtggtgacacttagtatgcagcatctgttgaatttatggtaatcgtcaaaatgacaaacgaaaaaaccggaaaaatgtgaaattttatacaaatttcatagaaagtgttgccaaattgtggtatagtagcactgttgaataaattttggaggttttattatgagacgttttgatgagaaaattatgctggtaaccggagctacttccggaattggaagagcggttgcaattcgtgcagcaaaagaaggtgcaacagtcattgcggtggggcgcaacgaagagcgtggagcggctgttgtagcagcaatggaagaagctggtggaaaaggagaattcatgaaatgtgacgtcagcaacaaagatgcagtaaaggcactttttgcagaaattcaggaaaaatacggaaaacttgatgtcgcagtgaataatgcgggaatcgttggtgcttctaagacggtagaagaattggaagatgatgactggttccaggtaattgatgcaaacttgaattcttgtttcttctgctgcagagaagaagtaaagctgatgcagccatcaggtggagccatcgtgaacgtgtccagtgttgcgggaatgcgtggattcccttccgcagcagcatatgttgcaagcaagcatgcagtcagtggactgacaaaagcagtggcagtggactatgctacaaaaggaattacttgtaatgcgatttgccctgcaggaacagatactccgcttacagagagaagttcagcagatattaagacgagaatggcagagattgcagcacagggaaaagatccgatggaatggctgaagaattctatgttgtctggaaagacagagacgttgcagaagaaaaatgcgacaccggaagagcaggcagcaacgattttgtattttgcaagtgatgaggcaagacacattacaggttccattgttgcaagtgatggtggatttactacatactaaagtaaaatgaaacaaagaacctcttgggagtcagtcggctcctgagaggtttttgtctgtttcatagaccttttttacatcagcccggcatctgaaaattgtgcagaaacagatgagaagagagcatgcagcaaaaaaagacatgcagagccgataatccaagatttcagcagtagctcctacaattacagaaaggatgctgctgacagccatcagaatcatattttcaaatgcattgattctggcgcgcatggattccggaatgtaagactggacggcagcaacacgtaaggtggcactgtttgttccgagaaaaccggcaaaggcacggtttacgagcataagaggatatggaagccaaagcagaataagatccatgcattcgtaaaaggtatagactgcaaaagtaacgtggaattttttcttttttggaatttcaatccggtactgcaccactccgccgatggtgcgtcctaaaaattcagcaatggaaaataaagaataaagtgcggcggacattccgggggcggtacggaaaaatgcgaccagaatgggagcatatccggaagcgaccccatttgtggctgccatatagtagtaaatagcctgtaatccacgttcttttttaaaatagcggagaacttcttgaagatcttctttccatacctgaaaagaaaatgttttttcacacacacgtgtttcttccgtcaactgaattgtgttttcaatgagtgcagcacatatggaaaacaatccttgtccgataaaaagccacggcataccgatcgtatccataagtactgcagccagaggcagcatgatcacacgcagtatggggtataacatggaagaaacggcatatcctttttgttccattccacttggtatgatctttggaaaaatactgttatatgccagttcatccagacttcccagtgtagcaagaagcaaagaatatccaagataaccaacgtatgaaaagtcgaaaaacagcaaatagattcccataagagcataaaagattccattgatgaaatctccaaatacaagaaatggttttctgggaaagcggtccatccagggagcaaccaacagtgggattaaaaaattggggatcaattggattgcgattacaagagcagatgcaaaggtgctcccagtttcatcaaaaacaagaaatgacaatgcgaaattgcccacaattcctcccatacatccaaaagttgtagctgcaatcaacagagaaaaatttctggtccataagggattcttcatatcgtgatatcacctcctgttttttagtatacaggaagaatgaaagaaagaaaataagggaaaattgagaaaattttatgaaagttttcaggtaaaagacgaaaagaaagagatgttgaaaaaagaatccattctttgtacagaatgatataatggagctagcaaaggaacggagaataggaacatgttagagcacgaacaaaaaaatgtatggaaaatgatagggatgcgaattcgccgggaacgtatcaaaagaaactggagtcagtcaggtctgtgttatgggatatgtgcagtatcttatctttccaaaattgaacagggaaagatggaagtatcagaagagattttgaagcttttgctggaacggttagagttaccgtggattgatgacaaagaaacaaaggatttagaaaattttgtggaagcacagtatgagtttctatttacgcatcctatacaagaatttttaaaacaaaaagaaatatttcaagagaaaaaggaaaagttgtattccagttcgttgatcgcagatgcctgcattttggaagcagtatatgagagtcgtaaagatgaaatagaggagggattggaacgttacctgaatttcaggcagcttgctgttctgcgtatgctgcagggaaggctggatgaggcaatcacattgcttccaattccgtttatgtatatgcgggcaggggagattctttatgagacaggccagaattacgcatcagctatttcttatctgcaaatgggctataatctggcagcccaggaagggatggcgatgctgatgttgcagtgccgcattatcatcggaaattgctacagcaatcagcaggaactggaaaatatggagagagagtatcaaattgcttcgcgtctggcaagagacctgcatcagacagaaatattaaaggtgatcaactataatcgggcatctacatgggtggcgcttggaagctataagaaagcgtacgactatttttcaaaagtagaagaacccgcgatattagatttgcataagcttgcaatctgttgtgaagcgtatggaagaaaagcggaggggatagaagctgtaaaacgcgcagagaggatgggagaattcggagatgatccagatgatgagaagcagttggaagtggaaatgtgtcgactggtccgctatcgtctggaacatgagaattatctgaaggaagaggaatatgaaaaacttttgtttccttgttttgagaaaatgaaagcaagactgcctgttggttttgcggtatttcatgtgccgtatgtactggagtggtatacagacagacgccaatataagcaggcatatgagatggtgagagcatatgggggatttattcaggtttcatagttttttttaattcgtacatttccggtatgaaaacagggaaacgataggcttcctcaaaaaaactcattctgtagatcgtgtttctttgaaaaaagcagagaagattgtaaacttaaaataaaaacaagtttacaatcaagcagccgtgtactatactgaagaaagaaatcagtatggaggaagaacaatgagtttgatacaggaaatcaaagaacaggtattgcagggaaatcagatcgccaaggcagaggcgttacagttatacgaacagccactggaggaattatgccttgctgcagacgaaattcgctacaggttttgtggaaatcgattcgatctttgtacgatcatcaatggaaagagcggcaggtgttcggaaaactgcaaatattgtgcgcagtcagcctgttatcatacagaaattgaagaatatccattgcttgcagtagagaagattacagagcaggcaaaatacaatgaggaaagaggcgttctgcgttattcgattgtaacttccggcaaagcattgaatgatacagaagtagaacatgtttgccaaagcgtgcgggaaattcacaaaaaatccaagatcgcagtctgcgtgtcgggaggacttttaaaggaagcacaatttcgaaaattaaaacaggcaggcgtcacaagggtgcataataatctggagacatcccgacagaattttccgaatgtctgtaccacccatacttatgaagaaaagatcgcggcgatccgcgcagcccaaaaagccggactggaggtgtgcagcggtggaatcatgggattgggagaaaccgtagaagatcgaatcaatcttgcattggaagtccgaaacttaggaatcaaatccatgcctgtaaatttactgaatccaattccggggacgccgtatgagaagaatccggttcttacgacggaagaaatgcgtcggatggttgctgttttcaggtttttgcttcctgatgcatggattcgcctggcaggaggaagagggcttcttccggacaaaggaagatcctgctttacatctggggcaaatgctgcaatttcaggagacatgctgacaactgcggggatcacgattgaacgggatgtgcagatgttaagagaacttggatatattgtgaaataaagaaatttgagaaatagaggaaaagtagatgtaaaagtcagttttttctctatttttctttacaaacaaatattttttgttataattagttagtcaagactaataaaagttaaatgcgagaaatttaagggagatgaaaaatgtttgtattgggtaaaatattaagtacagcagcggttttattatgcatattgtgtctggcagctccgatgaaaaaaacaaaggcgggacagaaaataaaaggacttcgtacactgctgaagccgcatgtgctctatggctggctgctgcttgttacaggattgatgcatgggattatggcaggtaagaatccggggatgatcagcggcaagctggtatgggtggtattggttatcctgcttttttgtgcctgcctgaaaaaatggatgtcaaaatctgtctggatatttttacacaggtgcctgtcctttgtttttgcagcaggaatcttgtttcatattgcgtatgcagtgatattctaaagcagcagttttggtttcctccttgtaaatctttctgactgacggtatactcagaacagaaagtattttcactagaggaaggactaaagagagaatggcaatcaaacagaaaaaaacaatcgccatagtagcaacaggcggtactatagccggaacgggagaagccggaaaaacagcagtctaccatgccggagagatgaatgtggagtcaattctggaaacgattccgatgctccagaatgttgcggatattgagacagtacagctgctcaatgtagacagcaatgagatggatgaagaaaagtggatcaccctggcgaatcagctcaatgatctggctgcccgtgaggatattgatgggatcgtagtcacacatggcacagacacattggatgagacagcgtactttttaaatttgacggtatatacacacaagccggtggtgcttaccggagcgatgcggccggcaacggcgaccagtgcagacggaccgtttaatctgtatcaggcagtatgtctggcagccagtgatgatgccaggggacaaggggtgatggcggtcttttccaatacgatatattctggaagagatatccagaaggtaaacaattataaaacagatgcatttgatcagaatgcatttggatgtttggggtatatgcaggatgagaccgcatattttttctccaaaagtttcaaaatgcatacgatgcagtcgattttttcgcttcgcaggctggagaacctggcaaaagtagctgtggtttatttttatgcaggagcagatgagaaaattttggattatcttgcagagacacatgagggaatcgtgatcgtggggtctggaagcggtaattataatcggaaatggatggagaggatcaagaaactttcagaaaaagggattgtatttgtcagggcatccagggtgtcacaggggattgtatttgacgaccgtgtgtttgatccgatggacgtttgcattggagcaaatacactgtccggccagaaggcaagagttttattaatgcttgcactgacgatcacaaaagatgtgaaacagatacgaaatatttttaatcagtattaaaatcaaacgaattctgaattgacaaaagtattgtttgtattataatgtataatacaaacaatacttttttaaatggagggaaaatgatgtggatccttatttttctaggaggagcgctgcttacggggtatgcattgtatcgacaggcgctcagagaatctggaagcagatttcagtgtcgtcattgtgggcacatctttcaaacagaatggaaaaatctgtttttgtctacgaacagctggggagaatataaattaaaatgtccgaattgcggggcggtagatttttgtgccaatctggataaaaagaaaaaacattagaagaggaggcatacaggatgttgattcggttggatatggcaagtgatattccaatctatgtgcagcttcgcaatcagatcgtgatggggattggtacaggggcgctgaaagtcggagaaaagcttcctacagttcggcagatggcagcggatgcaggggtcaatacgatgaccgtgaataagacctatcagctgctgaaggcggagggatttattgagattgacagaagacggggggcgatcgtgaatccggtggaagatacagcaggagtgtttcgggaaaagctggagggagaacttgcacttctgggagcggaagccaaggtcaaaggaatgggagagcaggaatttttacagttatgcgtgcagatcttccagaatttatcaggacaggatgaagaacttcagctcgaataggaggaaagcagatgcaggatagcataggatttcaaattatgatgtgtgtgatggccttctttgtgaatcttcttgtggcagggtgttttgcattcgtttatggaacaaagatgaagtacgaaaacggtatgctctttggagttcatatggcgaaagaagcgcagcagaatccggaagttatggctttgatggaacagtatgcagttcggatgaagcggttttattcgtggaatgtggcaggagcagtggtttctgctgcattggcatttagttacacttcgatatttatgctgggatggatgttctggctgtttgaatttaccatcggaagtatggtgtacatttgtaggtatcatcggaagttgtatgacatcaaaataaggaatcgatggtttgccggagaaggggcaaacattgtagtgatcgatacggcagcaagtgcaaaagtggaggaaagaaagatcagagcagtgtggcatcttccggcattgctgatcgttaccattctgtgtgtgactccacaagtgcgtgtctgggtgcaggaagagaaaaatcatttgttcattcctgtagtgtcaattttcgtgtcccttattttttcaggactgcatttttggatgaatcacaggcgttgcgatgtcatcagtgaaaatacgaaaaaaaatacggcgatccaggtcagagagagacggctgtggggatggatctggctggcaggaaattatacaaacctggcgggagcgggggtgttgctctggcagatttcccgaaaaggatatctggatacggtggattttattgtctgtatagtgttgagtatggcaggcgggagcttcatcctcgcggcaatattctggatgagacaaaaacgaaaagaagcattaaaaacagaggagccattaaattatgtagatgatgatgtttactggaaaaatgggtggtatcataattcgcaagacagacgctttatggttccggacaggatgtgcagcaccaattattcattgaatatgggaaaaccagtggttcgctgcctggccggagtgggcattgtggcaattacactcgttgtcttgtggatgttggttgtatttttcagaatggattttacccgcccgcagctgcagatcggggagaggaaagtgtctgtgcaatcagcagaatatgctatttcgtttgatcgggatgatatcaaagaagttacgcttttggattcatttccaaaggaagaattccacaggacgcatggactctctgacagcaggcagcttcttggaaagtttaaagggaaagagtccggaaaggcaatgctttacatccgccgtggagaaacaccggttttaaggattgaactgtcagaatatgtggtatttatcaacagtgaagatgccgaaaaagtgcagatgtggtatgaggaactttcctcttgatttcctgttttctccatgatatacttctcctgaaattttacaattattttcaggaggagtatttttttatggacgcagaccctgcagggaacaagattatttttgatttatgtatcttattatttttcacattgatgaatgctttttttgccggagcagagatggcggttgtatctgtcaatcacaatcggattcggagtcttgccgcagaaggcaacaaaaaagcagtcgttatccaaggtctttttgaagactctacgaagtttctttcgacgattcaggtagcaattacatttgcgggattctattccagtgcttctgcagcttccagtatttcaccagtacttggagtttggatggaacagcggggaatcccatatagtatggtgatcgcctcgaatggtgtgacattgattttgatgttttttaatttggtatttggagagctggtgccaaagaggatcgcgctgcagagagcagagcaattttgcatgatcacagtgatgccgatccactatatttctaagattttatccccgtttattaaattactttcgatttcaacaaagggtgtcttaaagctgcttcggatgaagacagaagatcaggaagagatcgttacagaggaagagatcaaggcaatgctgaagatgggagcagaatccgggacagtagaagacagggaaagagagatgatcaattcggtcttttcatttgatgataaaagtgcaagagagttgatggttccccgaagagaagtgtttgctgtggatattgaggatccgtctgaagaaattctggatatggttttggaatccagacattcccgaatcccggtctatgaagaaacggtggataatattatcgggattctgcacaccagagatctgatgcttgcgatgcgcaggcagtcttctgtggatctgcgcagtcttttaagagaagcgttttttgtaccggatacaaaagatgcagacgatctgttccgggaattacaggcatccagaaggcacatggcggttctggtagatgaatatggaggtttttccggaattattacgatagaggatctcgtggaggcgattatgggagatatccgtgaagaagatgaaacagcagagccggaagtgctgcagctttcggaagatgcgtatcttgtagatggaggaatcctgttggaagatctcaatgaaaaacttcaactgtcgttatgttcggaaaactatgatacactgtcaggctatatgattgaaaatctgggtcatattccgaaggaaaacgaacaggtttcaatcctggcagacgggtgggaactgcaggcagaacagatgaaagacaatcgtatcgcacgagtgcacctcgggaaatattccgggaatgtgtcagaaaagtaataagtaattattaggaaaagtaagtaacagacaccgatgaaacagtggatttatattgaattctaataaattcaaagttataataaggctgtatttataaatagaattcgtaatcaaaggagaccatctatatgaaaatgttatcaatcgagcaggaattaaaaagtaattcttatccgggaagaggaatcatccttggaaaaagcgaagatggaacaaaagcggtagcagcctattttattatgggaagaagcgagaacagccgcaatcgtgtttttgtagaagaaggacagggaatccgcacacaggcatttgatccttccaaactgacagatccaagcctgatcatttatgcaccggtccgtgtgctgggcaataaaaccatcgtgacaaacggagatcagacggatacaatctatgagggcatggacaaacagatgacatttgaacagtctctcagaagcagagaatttgaaccggatggtccgaattatacacctcgtatttccggaatcatgcatcttgagaacgggacatataactatgcgatgtccattttaaagagcaacaatggaaatccggatgcctgcaaccgttacacatttgcatatgagaatccggttgccggagagggacattttattcatacatatatgcatgacggaaatccgcttccaagttttgagggagagccaaaactgattgctgtaccgaacggaattgaagaatttacagaacttttgtggaacagtctcaacgaggagaacaaagtttctctgtttgtgcgttatatcgacattgcgactggggatatcgagacaaagattgtgaataaaaatcaataatcacaggcagagtgtggataaaggagaagaaaatgaaagaattagaattaaaatacggatgtaacccgaatcagaaaccggcgaagatcgcagtcaacgatggaagagaccttccaatagaagttctttgtggaaaaccgggatatatcaattttatggacgcattcaacggatggcagctggtgtctgaactgaaaaaagcaacaggacttccggcggcgacttcttttaagcatgtgtcaccggcaggcgcagcagtcggccttcctctgagtgatacgcttgcaaagatttattgggtggatgatcttggagaactttcaccgcttgcatgtgcttatgcaagagccaggggggcagacaggatgtcttcttttggagattttattgcactgtctgatgtatgtgatgtttccacagcaaaattaatcaaaagagaggtatcagatggtgtgatcgcaccgggatatgagccggaggcgcttgagatcctcaaagagaagaaaaaaggaaactacaatgtgatccagatcgatccgaactatgttccggcgccgatcgagcacaaagatgtatttggaatccagtttgaacagggaagaaatgagctggtgattgacgatgcattgtttgcaaatgtagtgacagagaatgcagagattccggaagctgcgaagagagatctggcgatttctatgatcacactgaaatatacacagtccaattctgtatgctatgtaaaagatggacaggcaattggaatcggagccggacagcagtccagaatccactgcacaagactggcaggaacaaaggcagacaactggttccttcgtcagagtccacaagtgttaggactgcagtttgtagacggaatcaagcgtgcagacagagacaatgcgattgatctgtacattggagaagattacatggatgttctggcagatggagcatgggagaatatcttcaaagtgaaaccggaagtgttcacaagagaggaaaagagagcgtggctggatcagatgacagatgttgcacttggttcagatgcatttttcccatttggagataatatcgaacgtgcacacagaagtggtgttaaatatattgcgcagccgggtggttctgtaagagatgacaatgtgattgagacatgcaataaatataaaatggcaatggcatttacaggaattcgtttattccatcactaaaatgtggtaaaatccgtatgacgggaaaatcaatcccgttatgcggattttttatgttagaaggaaaagtatacgatgtctgatggaggaaagaaaagaatgacaatagagacgagaagtgcacaagaaacatttcggcttggaaaagaactcggggagaaagcatatcctggccaggtttttaccctgacgggagatcttggtgtgggaaaaacagtttttacccaagggtttgcagcaggacttggcatcacagaaccggtcagcagtccaacgtttacaattgtacaggtatacgaagaaggcaggctgccgttttaccattttgacgtgtatcggatcggagatgtggaagagatggaggaagtaggctttgaagattacgtgatgggcgatggagtttccctgatcgaatgggcgaatctgatcgaagaaatcctgccggaaaaacggacagatgttacgattgaaaaaaatttggaagagggatttgattatcgtaaaattaccatagaagagacgatttagacaaatctgtttgcacaattgaagaaaacacggtaacatagaaacaataagaacaatcgaaaaagaaaggaaatagcgtatgcgggtattggcaattgacagttccgggctgactgcgactgttgcggtcgtggaagatactcagactgtcgcagaatatacgatcaattataaaaagacacattcacagacattgcttccaatgatcgatgaagtggtaaagatgacagagttggatctaagtacaatcgatgccattgcggtggcaggaggaccgggatcttttacagggcttcgaattggatctgccactgcgaaggggctgggtcttgcgttgaacaagcctttgatccatgtgccgactgtggacgggcttgcatataatgtatatggatgtgaagatattatttgtccgatcatggatgcaagacgaaatcaagtgtatacagggatttatacattttctaaaaaggcgggaacgaaggaagggtgtaatctgacagaacctgttttccaggtgatcaaaatgcagatggcagtttccattgatgaacttgtagaacgtctgaaccgatatcggcagccagttgtatttttaggagatggtgtgcctgtatatgagaatgtattggcagaaaaattgacagtaccgtattcgtttgcgcctgcatatatgaatcggcagagagcagcggttgtgggaacacttggaattaagtattataaggcggggaaattcgaaacagcagaggagcaccgcccagattatctgcgggtttcacaggcagaacgtgaacgtgcccagagagaaaaagaggcagagatgatcgtgcgtgaactaaaagtagaagattccgcggcagttgcagagatggagcagcagattttttcagatccatggagtgaaaaaagtgtgttggatacggtgaggcagaaacagtccgtttgttttgcagtagaaaaagccgggcatcttctgggatatctgcttgcatatcatgcggcagatgaagcggagatcgcaagaattgcggttcagaaagagacgcgcaggcaaggggctgccggtaagctgatgctggcgctggaaaattactgtgtggaacagcatatcggaacacttcttctggacgttcgggagagcaatgaagctgcgcgtagtttctatacaaaacatggatttacagaggatgggattcgccaggcattctaccgcaatccgtcggaagatgcagttcttatgagcaaacagcttggcgctggcagcagctcccagtaggaattgtgttgttgtccagttataatagaggcgtagcaaaaagaaaatccgaacatcacaggaggaaattttatgcgccagtatgaattaaaagaacgaaaagaaatcagcaaaatcatttgcaatcaatgtggaaaagaaattctggtatcaaacggacatgaggtggaaggggtattccatgcagagcatcaatgggggtatttctctgaaaaagacggggagagacacacctttgatttatgtgaagcatgttatgacaaactgattcaatcttttcagataccagtggaaatagagggataatatgttggatatatgtttattgggaagcggtgggatgatgccgcttccttatcgctggctgactgcgttgatgacacggttcaatggcagcagtctgttgatcgactgtggagaaggaacccagattgcgatcaaagaaaagggatggagttttaaacccattgatgtaatctgctttacccattatcacggagatcatatcagtggacttccgggacttcttctcaccatgggaaatgcagatcggaaagagccactgactctgatcggacccaaggggctggagcgtgtggtgtctgcactgcgagttattgctccggaactgccgtttccgatcatttataaagaaatcgaaggggcagagcagattttcgaattaaacggatatcgcctgaaggcatttcgggtgaaccacaacgttctctgttatgggtatacgatggagatcgatcgtgccggaaagtttgatgtggaacgtgcaaaagaacaggaaattccacagaaatactggaaacatctgcaaaaaggggaaacgatagagacagagttgggaaccctgaccccggatatggtgcttggaccgccgagaaaaggtctgaagcttacctatactacggatacgagaccgactaattccattcgggaaaatgccaaagattctgatctgttcatctgtgaaggaatgtacggagagaaagaaaaggctgccaaggcagtggagtataaacatatgacattttatgaagcagcacatctggcaaaggatgcacaagtaaaagagatgtggctgactcattatagtccgtctctgacaagaccggaagaatatatggatgaagtgcgccggatttttccggaagcaagagccgggaaagacagaatgtccaaagaactggcatttgaatagaaagaggtttgcaatatgaaagaaatcagagatatcaatatattagcgattgaaagttcctgtgatgaaacagccgcagcggtgatccataatggaagagaagtgcgttctaatgttatttcttcgcagatcgaactgcataagctgtatggaggagttgtgccggagatcgcatccagaaagcacattgaaaagatcaaccaggtaattgaagaggcgctcaggaaagcagatattacattggatgaaattgatgcgattggagtcacttatggaccaggacttgtaggtgctcttcttgtaggtgtggcagaggcaaaagcgattgcctacgcaaaaaatcttccactggtaggagtacatcacatcgaaggacatatttctgccaattatattgagaatccagacttggaaccgccgtttttatgtctggtggtatccggtggacatactcatcttgtctgtgtgaaagagtacgggaagtatgaaatattgggacgtacccgtgatgatgcagcgggagaggcttatgataaagtggcgagagcgattggccttggatatccgggaggccccaaaatcgatcggatcgcaaaagaaggaaacccggatgcgatacagttcccaaaagcacatatggattcggaatatgattttagtttcagtggtctgaaatcctcggtattgaattatatcaacggctgtaagatgaaaggagaatcttataatccggcagatattgcggcctcgttccagaaagctgtggtggaagtgctggtagaaaattctatgcatgcagtagaaaaatatggaatgaataagtttgcgattgcgggaggagtggcatccaacagtgccctgcgtcaggcaatgcaggaagcatgtgaaaaacgcggcatcaaattctatcacccgtcaccgatctattgtacggataacgcagccatgatcggagttgcagcatattatgaatatttggcaggaacgagacatggactggatctaaatgcagttccaaatctaaagcttggagaaagataaagcatatgaaagaaaaagagtttgcaacagcaattgttctggcagcaggcagagggacgcggatgggaactaaaatacaaaaacagtatctggatttgtgtggaaaaccggtcctctattattctctgcatgcatttcaggaatctcctgttattgatgagatcctgttagtgacaggagaacaggaaatcgaatactgccagaaagaaattgtagaaaaatatcaatttacaaaagtgaggaaaatacttgccggaggggcagaacgttatctttctgtctggaatggaatccaggcatcggaacagaaaggctatgtgtttattcatgatggagccaggccatttgtggatgcggatatgataaaacgtgtgtatgagcaggtgcagaaggaaaaagcctgtgtagttggtatgccggtaaaagataccatcaaaattgcagatgaaaaagagtacgtcaagacaacaccggacagaagcatggtgtggatgatacaaacgccacaggtattttcatatgatatcgtcaaaggcgcttatgaaatgctgatgcgggaaccacagatttctgtgacagatgatgcaatggttgtcgagcagatgttaaattatccgattcgtctggtgtatggttcttatgaaaatattaaaattacaacaccggaagaccttgagatggcggaagtatttttgaagagacgaaaataaaaaacaacctctggagaacaatcaaagtgctttagaggttgttttaaattcgatattgcaaaaaaataaaaaaagtagaaaaaaggtgttgacattctggatagtattatgctagaatacacattgtcgcgagggcggacaagacaatttaacctgtaagaagaacaggaagtatggagaggtatcgaagtggtcataacgaggcggtcttgaaaaccgtttgtccgagagggcgcgtgggttcgaatcccaccctctccgcttgggaagttcagaattgaatggacttccttttgttttccttgaaagtgcacatgcacagctgagaagtctgagatatgtggcagcgaagaaaggatgaacaaaaatacatcgtgcagaatacacggacattttggagaagtacccaagctggccgaaggggctcccctggaaagggagtaggtcgttagtagcggcgcgagggttcaaatccctccttctccgttactttctgaattaagaaagtacacattgaaaagctggaaagaaaaataaaaaagttcttgacaaagagaagtcaatgtgataatctaaataggctgacttgtgagggagaaaagaatccggaacagacagcgaaaagaaaaataaaaaagttcttgacaaatgagaaacggcgtgataaaatattagagctacttcttataaacaagaacagcgaagaaccttgataattaaacaatagacaacaaccttgaaaatttcttaagagaagattttttaagaacagcatctaagagatgcacccgtcacatgagaatgtgacagacagtaaaagggatgaattagctagtagttaattctgaccggaacgaacacttttaacgagagtttgatcctggctcaggatgaacgctggcggcgtgcttaacacatgcaagtcgagcgaagcacttttgcggatttcttcggattgaagcaactgtgactgagcggcggacgggtgagtaacgcgtgggtaacctgcctcatacagggggataacagttggaaacggctgctaataccgcataagcgcacagtaccgcatggtaccgtgtgaaaaactccggtggtatgagatggacccgcgtctgattagctagttggtggggtaacggcctaccaaggcgacgatcagtagccgacctgagagggtgaccggccacattgggactgagacacggcccaaactcctacgggaggcagcagtggggaatattgcacaatgggggaaaccctgatgcagcgacgccgcgtgagcgatgaagtatttcggtatgtaaagctctatcagcagggaagaaaatgacggtacctgactaagaagccccggctaactacgtgccagcagccgcggtaatacgtagggggcaagcgttatccggatttactgggtgtaaagggagcgtagacggcatggcaagccagatgtgaaagcccggggctcaaccccgggactgcatttggaactgtcaggctagagtgtcggagaggtaagcggaattcctagtgtagcggtgaaatgcgtagatattaggaggaacaccagtggcgaaggcggcttactggacgatgactgacgttgaggctcgaaagcgtggggagcaaacaggattagataccctggtagtccacgccgtaaacgatgaatactaggtgtcgggtggcaaagccattcggtgccgcagcaaacgcaataagtattccacctggggagtacgttcgcaagaatgaaactcaaaggaattgacggggacccgcacaagcggtggagcatgtggtttaattcgaagcaacgcgaagaaccttacctggtcttgacatccctatgaccgctctttaatcggagctttccttcgggacagaggagacaggtggtgcatggttgtcgtcagctcgtgtcgtgagatgttgggttaagtcccgcaacgagcgcaacccctatctttagtagccagcatttcggatgggcactctagagagactgccagggataacctggaggaaggtggggatgacgtcaaatcatcatgccccttatgaccagggctacacacgtgctacaatggcgtaaacaaagggaagcgaacctgcgagggggagcaaatcccaaaaataacgtctcagttcggattgtagtctgcaactcgactacatgaagctggaatcgctagtaatcgcgaatcagaatgtcgcggtgaatacgttcccgggtcttgtacacaccgcccgtcacaccatgggagtcagtaacgcccgaagtcagtgacccaaccgtaaggagggagctgccgaaggtgggaccgataactggggtgaagtcgtaacaaggtagccgtatcggaaggtgcggctggatcacctcctttctaaggagaaagaagtagaggaagtaagagctattgtttaattatgagggttcatcaagaactcaacttttttggtggcgatgcgctcaggggaaacacccgtacccatcccgaacacgatggttaagacctgagcggccgatggtactgcactggagacggtgtgggagagtaggtggccgccaaaactaaaaaaagaaaaaagaactggtttcaccagtgattagagattaaaagagattttggtttctaatgactgatgaaaaagcagtcagatgtaccttgaaaattgcatacaaagagaaatatcttatgaaaataagagagttgaataaaattcaacaagacatccgaggtaatgttaacaacattataacaaacaaactattaccaacgcatgtaacgctatacatgtgtcgatgagaaacaacccgtgtttcttgtcagttggttatgctaataagagcgtatggtggatgccttggcactaagagccgatgaaagacgtgataagctgcgaaaagcttcggggaggagcaaatatcctgagatccggagatatctgaatggggaaacctacttgagaagacctcaagtatccacagcccaatccataagctgtggaagggaacccggtgaactgaaacatctaagtagccggaggaagagaaaacaacatgtgattccgtaagtagcggcgagcgaacgcggaagagcccaaaccggagtgcgtgcactccggggttcggactgcagaatcgatgagtgagcctagtagaatggttttgggaaagccagccagagagggtgaaagccccgtacacgaaaggcgagcgagcgaagcaggatccagagtaccacgagacacgtgaaaccttgtgggaatgcgcggggaccaccccgtaaggctaaatactccttagtgaccgatagcgcatagtactgtgaaggaaaggtgaaaaggaccccgggaggggagtgaaagagaacctgaaaccatatgtttacaagctgtggaaccgctttatatgcggaaccgcgtactttttgtagaacggtccggcgagttacgctggctggcgaggttaagcactgaaggtgtggagccgaagggaaaccaagtctgaagagggcgaaatagtcagtcggagtagacccgaaaccgggtgatctatccatgtccaggttgaagttgccgtaaaaggcaatggaggaccgaacccacatccgttgaaaagggtggggatgaggtgtggataggggagaaattccaatcgaacccggagatagctggttctcctcgaaatagctttagggctagcctcatgcaagtcttacggaggtagagcactgaattcctaagggggcgtcaaagcttaccaagggatatcaaactccgaatgccgtgtagatggtgcatgggagtcagactatccgagataagttgggtagtcaaaagggaaagagcccagacctacagctaaggtcccaaaatgtgtgttaagtggaaaaggatgtgggatttcgaagacaactaggatgttggcttagaagcagccatccattaaaagagtgcgtaatagctcactagtcgagaggtcctgcgccgaaaatgtccggggctgaaacacactaccgaagcttaggaattgatgaatgtcaattggtagaggagcattcttaacggggcgaagctgtaccggaaggagcagtggactgttaagaagagagaatgccggaatgagtagcgagaggaaggtgagaatccttccggccgaatatctaaggtttccagagtaaagctgatctgctctgggtaagtcggggcctaaggcgaggtcgaaagacgtagtcgatggataacaggtaaaaattcctgtactatatcataacagaactgtggggacgcagacagagagcataagccgggaatggaaaaaccggtacaagcgaggtaggagtgcatcaggcaaatccggtgtacaatctgaagacgtgacgtggggcgtaaagccggaagtatgtgagctggctgccaagaaaagccgctattgtttatgatatacccgtaccgtaaaccgacacaggtggatgaggagagaatcctaaggccgacgggagaagcattgttaaggaactcggcaaaatgactccgtaacttcgggagaaggagtgccatgtaaaagtggccgcagagaattggcccaagcaactgtttagcaaaaacacaggtctatgcaaaaccgaaaggtgaggtatatgggctgacgcctgcccggtgctggaaggttaaggggagaggttagtcgtaaggcgaagctttgaacttaagccccagtaaacggcggccgtaactataacggtcctaaggtagcgaaattccttgtcgggtaagttccgacccgcacgaaaggcgtaatgatttgggcactgtctcaacaatgcacccggtgaaattgaaataccagtgaagatgctggttacctgcgccaggacggaaagaccccatggagctttactctagcttgatactgggattcgatattgcatgtacaggataggtgggagactgagaactgatgacgccagttgtcagggagtcactgttgggataccacccttgtagtattggatttctaaccagcagccgtgaaccggctgggggacaatgtcaggtggggagtttgactggggcggtcgcctccgaaagggtatcggaggcgctcaaaggttccctcagaatggttggaaaccattcgaagagtgcaaaggcagaagggagcttgactgcgacaccgacgggtggagcaggtacgaaagtaggacttagtgatccggtggtataaagtgggattgccatcgctcaacggataaaagctaccctggggataacaggcttatcactcccaagagttcacatcgacggagtggtttggcacctcgatgtcggctcatcgcatcctggggctgaagtaggtcccaagggttgggctgttcgcccattaaagcggtacgcgagctgggttcagaacgtcgtgagacagttcggtccctatccggcgtgggcgtaggatatttgagaggagctgcccttagtacgagaggaccggggtggactggccgctggtggatctgttgtattaccaaatgcatagcagagtagccaagccgggacgggataaacgctgaaggcatctaagcgtgaagcccccctcaagatgagatatcccataacgtcaagttagtaagaccccttgaagacgacgaggtagatagggcagaggtggaagtgtggtaacacatggagctgactgttactaataggtcgagggcataaccaagcaaggtgataggaaaaggatgattctttgtatgcagttttgaaggtacacttcaatatttatattcctcgatagctcagtggtagagcattcggctgttaaccgaagggtcgttggttcgaacccaactcggggagctaagagcttcaagagaggctcttttttaatgaagcacatgtgggcttatagctcagccggttagagcgcacgcctgataagcgtgaggtcggtggttcgagtccacttaagcccatacttcaaaaaaagcaaaaaagtgcttgcaaaaacaaaagacatatggtattatctttatgttgagtcgcgattgaatgcgatgaataaggctccatggtcaagcggttaagacatcgccctttcacggcggtaacacgggttcgattcccgttggagtcatttcagattgatttgatattaggttaaggcattatgccgatgtggctcaattggcagagcagctgatttgtaatcagcaggttatcggttcgagtccgatcatcggctttgttcctttagcgggacattatagagtgtggacctttagctcagctggttagagcaatcggctcataaccgatcggtcccgggttcgagtccctgaaggtccactaaaaaaataatgaataaggcccagtggctcagttggttagagcgccgccctgtcacggcggaggtcgagagttcgagtctcttctgggtcgtttttaaagaaaagaagattgtatattctgggatcttagctcagctgggagagcatctgccttacaagcagagggtcacaggttcgagccctgtaggtcccatttcataaagccagtaatgccggcgtggcggaactggcagacgcacaggacttaaaatcctgcgggacttatactcccgtaccggttcgattccggtcgccggcattactgactttatgagaagaaagataccgcagaattgttgaggtagacagttctgcgatattttttataatattttgtacaaataaaagccagggtgcgatgtgatcgcattcctggcttttggtatttgtgtgtgaattattcaattgcatctgtttcaattacgaacttaacagttccttccatatcttttgattttccactgaatgtatcataactgcatgaatcagaagtgagggcttctaagcgatctagtatacttcctaattcctgttctactgtatttttcagtttgcgtgtgccttcttggtcgaatttctgcattccgtcgtttaaagtgtgtgctccgttttgaagctgtgaaattccgtcttttacttgtttacttccgttgaacagagtggttccgcctttggaaagttctgttgttcccgctaggagtgaggatgcgcctgtacgcagtatttcactatttgcagcaagttctgcagaacctccggagagttgagaaccaagtgtatttaggccggctgccaactcatctgtgcctccagcaagcgtgtttacgccagttacgagagaagggctgtttgccttgagtgatgcggctccattgagtaatgtttgattgtatccatccaattgttgaaagccgctgagtaaggtatcaatcccttttactgctgttgggagcgaatctgtggatgtatccaaagtttcaatattttgagaaactttgctcaatccctggtcgagagctttcattcctttgttgattttatttacgctgtcctttaactggttcattggtttttccggaagttgtatgctggaaagttgatccagctgtttctgaatatcaggaagttttgctgccagttttacaaaggaggactgaacgctctgataagcggttgaaatttgggctatggtttgtgtcaatgcactagtatctaatgatggaagctgactgtttccgtcatttgtaaccggggtaagtggatgaagcgaagtgcttaaatttcccgcctgagcttgtgcttctgttaatatgttgatggatgactggagttgtgctgcaagctcggtattaccggatgcggttgcctgggtaagctgtgcattgagagaatcaatggaagcttgaatctgtgaactcgtattcgccgcagtgttgctcattgcttgaatctgtgcattttgctcattgatttgtgtattgatgttggaaacaatggcatcgcagctggttttaaaagttgaaactgtctgattgatttcttgtaattgtaaagtaagttgtttcattcctgtaatcagttgaagtgcgggctgcatcatttcctgtttcaggtcggaagaaagactggaaacttcttccagcagtttctgcccggatgaagtcatagaatcaacttgttccaggagaggctgcattttatctaatgcatctgaaagttgttccgttgcttttgcaagttgagatgatgcggctttgatatcttcagaagaggaaccttttccatccagtgcagaatttaattgagtaatggcagattttatctgaatcagcccgtcaccaagttctgacaattgtgatgcaccgtctgaaagctgttgttccccctctatataagaggaaattccatcgcacagctggtcggcaccctcggtataggattttgtaccgagaacaagtgtattgacaccattgacatattccgttacttttccagttagaattccgttggaccccagataggtctggatcccggcatttaactgatctgcaccggttgtgtatgcacggattccgtttgacagagtgtcagctccctgattgagagcatcaatgcctgtttttaaagtctggattccggcatcaaattcttcataactgtctcccagagtatcagcgccttctgaaagtcgtgcagaaccgtcaacaagctgcatggctgcattttccagttcatccaaagaagctttcagggaatccatatctgtaatatcctgaagattgagctggtcaaaaaggtcagaaagtccgacagtaaaggtggaagacattgtaaaatctgtaacatcagcagaaatttccagactttcagggagtgtgagtgaggaatctgaagcagcatcgctcattccaagactttctttgagtccgggagttgtaaatccaagtacgatatttcgatttccgtcggagatgacttttccgttgtcgatcatgacattggaaaaagtgtccgtaggaagaatcagtccggtgagcatgacaaaaggagaatatacttcttcggatgttccatcaatggttacggttttcttttcatgattggtatagtcaattttaatttgcaggtgtccgctttttcccttcaaatcctgtggcgaaatctcagttccatccagaaaataagttaatttgacagaaacgggaagttttttttcagtagtcccctggtagtaaatatcttttccatcggtatcccaggtcagggaatctccagcttctgagaaagtttctgttcctttgatgtttttgattccatccagtgtactttcatctgctacggtatccgtaagaccggcgtttttcagccagttagagacagttacctgcctctggtttccggaagaatctgcatttacatagacagtttcatccttggaaatcgatggatcagctgcacagactggaagtgttcctaacacaagtgacattccggcagcaattccggcagttattttgcattttatttttctgtttttattcatttcaacaacatcctttctatttttcatcgagaaaaccaatggaggttttgcagatcagtttgtcgaacagcataaatgctgccggaagtactaaaattacgactgccatactaatcagagcacctcttgccaacagtgtacagatagaactgatcatatctacctgtgaataccaggcaacaccgaaagttgccgcaaagaagctcagtccgctactaataatagagagcatgcttgttttgtgtgcaatggaaatggcttcttttttgtcatgtcctcggcggcgttccttctgatagcgactggtcattaaaatcgcataatctacggtggctccaagctgaatggtaccgatgacgatacttgccacaaatggaaggctgtccccttggtaaaatggaattgccatatttacagcaattgcaaattcaattacagcaaccagaatgactggaagtgaaatagatttaaaaataatcatgatgatcaggaaaattgcagcgacagaaagtaagtttacatttctgaggtcaatatccgtaacatcctgaagatctttcatcaaaggtgcttccccgatcaccatggcattgttgtcataagattttacaattttatcaatggctgcgatttgtttgttgacctgtgaggttgcagaaccatactcagaacagacaaatgcaagttcgtagttgtcactttgcagcatggacttgatatccgacggaatcatcgaatccggaatggaaggtccgatcagagagttcatactcagactccattttacgcctttgatctcgtctacttcgcttagcatattttgtttgtcgagaccatccatgtttttatccatgaggatcatatgcatattgctcatatcaaaatcatcttccagttttttatttgcaacattgctgggaagagaatccggaagtgattcggcaatattatagtaaatcttggtgtggttgtttccataaattgcaggaagaagcaaaagcaaaaatacagccagccagatcttataatgttttgtgataaagttggatggtttttctacatttttaaacagtgctttgtgtttggttttttcaattggcttatcaaagatcaggatcaatgaaggaagcagagtaacacagcagattacaccaatgatcacgcctttgcccattacgattccgagatcccggccaagtgcaaatgtcataatgcaaagagcagcaaatcctgcaactgtagtaatggagctgccgacgacagatttgaaggtatttgcaatggcatgccccatggcacgttctttttctccggggaatcggagtttattttcctcatagctgttcagaaggaaaatggaataatccattgtgacaccgagctggagaattgcagtcaatgcttttgtaatgtaagaaatctgtccaaggaatatgttacttcccagattgtacaggatagcaactcctatactgaacaaaaatagaatcggcaccagaaatgactgagaagtcagctccagaataatgaaacacatgatcactgcaatcacaatgtaaatcgggagttcctgaagactgatattcttgatatctgtaacaacgccggtcattccactgatgaagcactgctggtctgtaatcttccgcattgccgcaactgcgtccattgcctcatcggaagaggtggtattgtcgaacagtgccagcatcatggtggcatctccgttgaaaaatgcttttctcagatcagaaggaagcatttccacaggaagtgtaatatccgcagcgtcatcgtaccagagtacatctttgacatgtggaaccttactgaatttttcttccagtctttgtacgtctttgagttccatatcttccacaacgaccatggaaaacgctcccatgccgtactcatcaaccagaatgtcctgccccttgacagtttccagatgttccggaagataacttagtaaatcataattaatttttgtctttgccattcccaaaaatgatggaatcagcagcagaattccggtcaaaaggatcaaaattctgtgcctggcaatccatttgccagttttgaccaataatatcatcccctatctttttttctgtaatacacattatagtacaaaatgactaatagtcaataatttgaaaagaaaaaatgaaaaaaagtcattttttattgactttctgatttttttgcccaataatagggatgcagctgcagaaagctgcagctgttatgatataccagggggaatgaacatgggaaaggtggaaacaaataagaaacggaagaaagatgcattatttcagacagcatatgaactgtttacggaaaaaggatttgcgaagacaaccatatcggatatcgtaaataaggcaggtcttgcaaaagggacattttacttatattttaaggataagtatgatctcagggacaggctgatcgcttatcaggccggaagattgtttgaagatgcacatcaggaactggataaacaggaaatcagtagttttgaggaagaagtgttgtttctgacagattatattattggacgatttgaaaagcagcattctctgatgcagtttattgcaaaaaacctgtcgtggggaatttttaaaaatgcattttccagtgcagaatttccggaggcacagggattttatgaacactatttaaaggcgttggaagaatttgatgtgaagtgtaaggagcctgagctgttattgtttacgatcattgagcttcttggttctacaagttataattgtatcctgtatgagcagccggtcacaatggaagaatatcttccccatctgcaccggatcctgcatcagcttttgcttgcatttacagagtagagatatatacagaaaagatcctgtgtcagtccaggatctttttcatatcagcgggaagaggcgcagtgaactccatcttttgccccgtgatcggatgaagaaatgtcaggcgatatgaatgcagagcctgccgggtaatgtgttccatatccggattgtagaggtagtctccgaccagaggaaatccaatgtatttcatatggatgcggatctgatgggtacgtccggtgccgagacgaagcgagaccaggctgtgcccgtttttctcttcaagaaattgatagtatgttacagctgtttcaccgtaatcaaagtctactgtccgctcgatgatcgaactgtccttgcggccgagaggagcggtgatgacgccggattcaggagtcagatgcccgcgtacgattgcccggtattcccggtgaatctctcttctggcattcatggaggataaaatggcagcgctgacaacatgtttggcaatgatcgtcaggccggaagtgtcccggtccagacggttcacacaacgaaaaataaagggctgtccctgctgttcaaagtaccaggcaagtgcattggccagagagttgtagtagttgttcaaagagggatggatcggcatcccggcctgcttgtcaacaacgaggatatcctcatcttcatataggatatggagtggatgctctaccggcggaacatgttcggaggaacgttcttccacgattttgatcaccagttcatcccgggatttgagagtgtgtgtcatgtggacccatttgccgtttagcaggacactttcgggtgtcttttttaaatgggtaatatttttggcggaatatccgcggtgtcttaaattttgttcgatggtaaatccggcatcctggtcggaaatcaaatatgtaatggttcggttcatagaatatgtacagttcctttttctttttatgatagcaaagaatcgaaggagcgtaaatcttttttgtagtttcaaaacagaaacctgtgttataatagcaccagttattcgatttttcatgagggcaagggaaaaaataataacaaaagtgaggaaaacaacatggatattaatcaaaaattgacagaagaactggaagtaaagcgctggcaagtagatgcagctgtaaaattgattgatgaagggaatacgattccgtttatttcaagatatcgaaaagaagcaacaggatctctcaatgatgaacagctgcggaaattgcacgagcgtcttgtgtatttgagaaatctggaagagaaaaaagagcaggtactttccagcattgaagaacagggaaaactgacagaggaattgaaaagtcagatcctggaagcagggacacttgttgtggtggaagatttgtatcgtccgtatcgtccgaagagaagaacacgggcaacgatcgcaaaagaaaaaggcctggagcctttggcggcagtgattaccctccagaagctgaaaatgccgcttttagaagaagctgaaaaatatgtatcggaagaaaagggtgtggcctgcgcagaagatgcaattgccggagcaaaagatatcattgcagaatcaatttcggatgaggcagactacagaagctggattcgaaagatcaccatgaaaaaaggaaaattgatctccacggcaaaagatccggaagcagagtcggtttatgaaatgtattatgaattcgaagaaccattgtcaaagctggcaggacaccgcattcttgcgctgaacaggggagaaaaagaaaagatcctgacagtgaagattgaggcaccggaggaagagattcttggctatctggaaaaacagatacttcgcggaaagaatctagatacagagcaggcactcaaagaagcggtggaagacagctataagcgtctgatcggtccggcgattgaaagagaaatccgcagtgatctgacagaaaaagcagaagatggagccatcgaagtatttgggaaaaatctgcatcagcttttgatgcagccgccgatcacaggccaggtagtacttggatgggacccggcatttcggacaggatgtaagctggctgttgtggatcccaccggaaaagtattgggaactacagtgatctatccgactgcaccgacgactccggcaaagatcaaagcatccaaagatctgttgaaaaagatcattccgaagtatcatattacgttgatctcgcttggaaacggaactgcatccagagaatcggagcagtttattgtagagctgttaaaagaaattccggaaaaggtacagtatgtgatcgtgaatgaggccggtgcatcagtatattcggcaagtaagctggccagtgaagagttcccgaaatttgatgtggggcagcggagtgcggcttctattgcgagaagactgcaggatcctcttgcagagcttgtgaagattgaaccacagtctatcggagtggggcagtatcagcatgatatgaaccagaaaaaactgggagaatctctgagcggagttgtggaagattgtgtgaataaagtcggtgttgacctcaatacagcatcggcaccgctgctttcttatatttccggtatttccggtgcgattgccaaaaatattgtggcataccgggaggaacatggaaaatttcaggatcgaagagagctgctcaaagtcgcaaaactgggaccaaaagcgtttgaacagtgtgccgggtttatgcggatccagggtgggaacaatccactggatgcgacaggggtacacccggagtcctatgcggctacggaaaaattgctggagaaacagggatttactctggaggatatcgcagggggaaatctgtccggtctgtccaaaacagtcaaagattacaaaaaactgtcggaagagctgaaaatcggagagatcacactccatgatattgtaaaagagctggaaaaaccggcaagagacccgagagatgagatgccaaagccgattctgcggacagatgtactggatatgaaagacttaaaagaaggaatgatcctaaaaggaactgtgcgaaatgtcattgactttggggtatttgtagatatcggagtgcatcaggacggactggtacacatttcgcagattacagaccgatatatcaagcatccgctggaagctgtcagtgtgggagatatcgtagatgtaaaagtgatgagtgtggatttgaagaaaaaaagaattcagttaacaatgcgtggaatttcctgaaacagccgcagatcacattttaagaattgcaatttgcagaacaatcccatataatggaacagaaactgagcatacccattatcgggatgctacaaatttggaaaagggggatttttatgctgaaaggcaaaacagtagtacttgcggtatccggaagtattgctgcgtacaagattgcatcactggcaagtgcactgaaaaaactgcatgcaaatgtacaggtgctgatgacaaaaaatgcggtcaattttatcaatccgatcacatttgagagtttgacaggaaacaaatgtctggtggatacatttgaccggaattttcagtacagcgtagagcatgtagcgcttgcaaagcaggcagatgtggttttagtggcaccggccagtgccaatgtgatcggaaagatcgcgcacgggatcgcagatgatatgttgacgacaactgtgatggcatgcaaatgtaagaagatcatcgcgccggcaatgaacacgaacatgtttgagaatccgatcctgcaggataatctgaagattttggagcattatggctatgaagtaatcagtcccgcagtgggatatctggcatgtggagataccggtgcaggcaagatgccggaaccggagcttctcttacagtatattttaagagagactgcatatgagaaagatatgcagggcaaaaaagtactggttacagcaggaccgacccaggaagccatcgatccggtgcggtatattaccaaccattcgactggaaagatggggtatgcaatcgcgaagatgtgtatgctgcgcggcgcagaagtgacactcgtgagcggtcctacaaccattgccagaccggagtttgtgcagatcgtggatgtggtgactgcaaaagagatgtatgatgaagtcacaaaacgggccaaagatcaggatatcatcatcaaagcagcggctgtggcagactatcgtccaaagacgataagcagcgaaaaggtaaaaaagaaagacgacaatctggcgctttctatggagcgtacggatgacatcctgaagtttttgggagaacacaaacaaaaaggacagtttttatgcggattttctatggaaacagagaatatgctggaaaattccagaaaaaaactggaaaagaaacatcttgatatgatcgtggcaaacaatctgaaggtagaaggggcaggatttgccggagataccaatgttgtaacgatcattaccgggcagggggaagtttcactcggaaaaatgacaaaagaggagacagcctcaaagatcctggatgaaattttaaaagtaacaaaatagtatggagacagaattagaaattctgtgccaatcggtattgtatctcaaaagagaatgataacaaggaggcaatttatgaatcagacaagtaacagaacgcaggcagcaggaaacggtgcaaagacgcagcatatggtacagacggcaatttttggcgtgatcattgtaatcatggcatttaccccttttctcggatatattccgctgggatttacaagagcgaccatcatccatattccagtcattttagcatcacttttgatggggccaaagacaggtgccttattgggtctgctgtttggaatcaccagctttgtaaataatacagtgaatccaaccgtgacttcttttgtattcactccgttttacagtatgggagaattcagcggaggaatcggcagtgtgatcatctgttttgttccgcggatcctgacaggtgtggttccgtattatctctataaactggtgaaaaagtacagcaaagcagacggtgtttcaaaaacaggactgatcctggcaggagttggaggatctctgaccaatacgattctggtcatgaacctgatttatctgttttttaaagatgcgtatgcagctgcaaatggagtggcagtaaaagctgtttacggatttatcttgtcgatcatcggaatcaatggagttccggaggcaatcgtggcaggtgtgctcacggtgctgatcggaagaacactgatgaagaaaaatatgaaagaaagactgggatttacacatggttttagcgattgatattggaaatacaaatatagtcatcggatgtattgaaaatggagaatgtctgtttgtggaacgactttctaccgttcatcagaaaacagaaatcgagtatgcgatcgatattaagacagtgcttgatatttatcagatggatgtggcacagattgacggtggaatcatttcttctgttgtgccgcaggtgacgaattcggccaggctggcactggaaaagcttttgaaaaagaacgtgcttgttgtgggtgcaggagtgaagaccggactgaatattcgcatggacaacccttcttcggtgggaagcgatctgattgtgggagctgtagcaggtgctgcgcagtatccggtgccgctgatcatctttgaccttggtacagccaatacggtctgtgtgatcgatcagaacaaagattatatcggcgggatgatctatccggggattcaggtatctgttgattccctgacggccaatgcgtctcaattaagcgggatcagtctggaagccccaaaacagatcatcgggaagaacacgatagattgtatgaaaagtggcgtaatctacagcagtgcatctgccatggacggcattatcgatcgtatggaggaagtgctgggacagaaagcaacggtagtcgcaaccggagggcttgcgaaaaaagtagtgccgcattgcagacgggagattatactggatgatgatctgctgttaaaaggcctggagattatctacgacaagaatgttacggcacgcacacgaatctgagcagaaagcggcgaaattcataaaaactacttgaattggacagcggaaagcactataatggtttgcagataagaaacaaatcttcagggtcgggtgtaagtcccaactggcggtaaagtccgcgacctgtcttctgtaaagtacagaggatggctgaaccggtgatctgcagagcagagattccggtaccaacagtaaagtctggatgaaagaagatgtatgtgtgagaagatgaaaaagaaccctggatttttcaatccggggtttgtttttttcttctccacaaatccggaaggttttctttcttgatcaaaatttgaatatattttgaaggagagaagaaacatgagtacacaaacaaacacagtagccaagagcacaacaaaagtaggtgcaagaacccttgcgattgtaggaatgctgtctgcagttgcagtagtattgatggcatttgagattccactcccgtttgcaccggtattttacaagattgatttcagtgaagttccggttctgatcggatgctttacgatggggcctcttgcaggtgcagcgattgagctgcttaagaatcttttgcatgtagtgatcagtggaacgcagactgcaggagtgggagaagtggcaaattttctgataggatgtgcttttattgtgccggcaggtgtgatctatcacaaaaagcatacgagacgaggggcgttgatcgggatggcttccggcacagtgttgatgtcagtcatcggaggagtgctgaatgcgtatgtgctgcttcctgtatatgcaaaggcgtttggaatgccgttggatgcgctggtggagatgggaacagaagtgaatgggaatattacaagtgtcgctacactggtactgtttgcagtgaccccatttaatctgctgaaaggtgttttggtgtcactggttgtatttttgatctataagaagatcagtccgattttccggatgaagtagaattatatgtttttatagagaatgaccaaaagcagaaaggtgcttttggtcattctcatttttatgaaaaaatatgtgataaatcttttgggcaaaaagtgcagctttgaccaggatgaaatgaaaagtcactatggtgcaatggaataagctccgtcaagcagcatacattgtccggaatagtagcaggaatccggaccagccaggaatgcaatcacaggagcaatgtcagtctcggcatctccgagccggcgcattggctgctgctgaaggattgcttcatatttttccgggaatttctgtgcccattcttttgcagccggggattctgctcccggcagtacacagttgacgcagatgccgtattgaccccattcttttgctgcaatctttgtcagtccgcgaacggcttctttatttgaaccataggcgagattgccggcataaccaaacataccggttgcggatgcaaagttgatgatccttccttcgtgctgctccttcatataagggaaacattcctgcatgaaattgagagatccgatcgttccggtagaccatgcgagatacatcagttcgtaagtggtctcctcgactggtgcagattttgcaactgcctgtgcattgttgacaaccacatcgacagtaccgtaagtttccacagtttttgcaacgacttcttttacacgttcgcgattggatgaatcacaagtcatatcaaaggcttctccgccaaatgcccggatctcggcaacagtctctgcgatcggttccggtcttctaccggtacatacaactttcacaccacgttttgcaagacagagggcaattccttttccaattccctgaccagcgccggtaacgattgctactttttcatttaattgtttcatattttcatagtcctttctttttatttttcgaaaatcatataagaaaattataccgtagacagtaggaaagtcaactgatttgtgcgaaaaataaaaaagaaaattaaaattaactgataaaatatcaggaaaattttttctgtttgtacagataatatccgatgaaaaacagtgcagtcaaaagccaggttaccggataactgaaaataatcgcggaaatcgtaggtgaaattttcagcgcaccgacgagccatacaattcgcataacacagatgccaagtaatgtgatgatcacaggcacaatgacatcaccgacgcctcttagtgcacccgcaagcacttctataaatacatagacaatataccagggagcaatcaagacaagcatgtcgcagccgatttgtatgacggtttcatcgtttgtgaacagactgaataaaatttttcttgtagcaattaaaaagattaccagtatggaagataccagaatatccataatcaaacagacacgggtgctttttttgatccgatccagttttccggctccataattttgaccgacgaacgtggtgatggaaattccaaaggcagtactcaccatccagaaaatggcatccagctttccataggcagaccaggcagcagaagtatcggttccaaatgtattgacagcagactgaatggcaatattggtgatagcaaagagaattgcttcaaatccggtaggaagcccaagttttaactgatttttcaatacagagccatggaatcggatgcgggagaaggaaagtttcagcatcccatctgatcgcatcagttttcgtgtgacgagcaaggcactgaaagcttgagagatcaaagtagcaacggcaactcctaatacacccatgtggaagaagatgacaaacagggcatccagtacaatattgagcaggcagcagacaatcagataataaagcggacgtttggaatcgccggtggcccgaagaatgctggatcccatattatataagaatacaaaaagaattcctgcaaaataaatccggagatagattacggaatcgtgcataatttcagaaggtgtattcatcagtttgagcattgcaggtgtggtgatcatcccgatgattccgaggagaatcccaccaacaatggaaagggcataggcattgtgaagtccgtcactggcagcctgttcatttttggcaccaaaatattgtgcgatcagaacagcggcaccggaagaaagtcctgtaaaaaatcctacgatcagagcgacaatctgtgcggaagagccaccaacactggcaagggcggcttttccaacaaattgtccgacaatgaccgtgtcaatggtgttatatagctgttgaaaaaaggttccaagtaaaattggaaaaaagaaaaagagaagttgtttccagattacgccttcggtaatctgatttgtcgattgtttttgtgtcataataatccccttacttaaaaaataatcaagtcgatgaactcactcatatgtaaagaatatcagattttacaaagatttaacagagaaaaatggaagttctgcgataaaataaaagaaaataaaatcagaaaaatcaggagaaagatttcggtgattttgtagtatttttacaagaggtgaagacatggaacaatctgtggaatttttaattaagagtcattatgcacagcttcgtgcttccgaaaaaaaggtggcagattatgtattggaacaagggatgaactgtaaaaaaatgaccatcgatgcattggcagaagaaagtaaggtaagccagcctacagtgatgcgttttgtcaaagcagcaggatttcaaaattataaggaatttcagtatgcgttgatgtgtcaggatatgcaggcaaagatttcttcagaaaaaaaagatacagaacaggtactttatggataccagctgcatccgcaggatcaaatgaagagtgttccggaaaaagtcgtgtcaggaaccattgcgatgttggaagagatgttaaaaagtattgcagtgaatgatttggaagaggctgtaaatttaattgcaaatgcaagaaaggtatatttgttttgcgtagaaaattcagcagcaacagctgcagatctgatgacaaagcttttatatttaggagttgactgtcaatattatgccgactattatctgcagaaaatatcggcatccagtttgggaccagaggatgtggtcattgctgtttcctattcgggacagtcaaaagatgttgtggatactgtaaagacagcgaaaaaaacaggggctaaaattatagtgatcaccaattttgagcagacacttttggaaaaatggggagatgtggtattgagaagttctcagaaacagttattgtacggcgatgcaattttttctagagcaacgcagatggcattgatcgatatgatctatatgggattgattttgagtgattatgagaaatatacaaaacaactggatcggagcagcgcaattgtgagagacaaggcatacagataatcgtataagacactgtgaaaatcttgtaggaaatctacaaaagttttgcagtgtttttttgcgccattttacatttctctaacatgattttgaactggatttgattgagtgtgaaaaaatgcattgctataattccaaatgtcaacagggcggaatgcctgctagcaaagaaaggaagaattcagatgctgaaattagaacagataaaaaagtcttatgatggagttgaaattttaaaagaaatgaatctggaaattgaagatggcgaaattgtttcgatcttaggaccatccggatgtggaaaaacaacacttttgaatttgattttaggaattatagaagcagacagtggaaaaatctggtttgatggagaagagattacgaatctggcaatggaaaaaagaggattcaatatcgtatttcaagactatgcgttgttcccaaatctgaatgtatataaaaatattgtgtatggattgaaaaacaaaccggggatttcttctgaaaaagaagtggaggaactgattgaacttttggggctgaaggaacatttaaataagaagatcgatcagctttcaggaggtcagaagcagagagtggcactggccagaacattggttatgaagccgaaaatcctgcttctggatgagccgcttagtgcgctggacggtgtgattaaagaatcgattaaagagaaaattaagatgattgcaaaggaatttcatctgacaaccattattgtgacccatgacccggaggaagctctgacattatctgatcacgtactgatcattcaggagggaaaaatcgcacagtacgacacaccagaagaaattgttaaaaatccaggaaatgcatttgtcagggagtttattttaaaacagttggagattaagaaaaataacatatactctctgtttacagtacccaaaaatattccaggcattgcagcaggaaaggtacaggagatactgacagggcgggaagaactggtacaggtatcataggagaaagagatgaaaacgaagaatcgggaattaaagattatatttatggtgacaggagcactgtttgtgctgtttcttgtgtatccgacagtaaggctgctgttaaaatccattctttcagagaacggaatgacaatggagttttattgctcagtattgacgcagaaagggtttttaacggcgttgggaaacagtttcctgattgcgggagtcagtgcacttcttacaacaggactggcatttttccttgcctataccattcattatacaaatatccatgtaaaattcaaaaaaggaattgagaaggcggctgtacttccgatgttccttcctacattgacatatggatttgcaattatttattcatttggaaaacaaggtcttctgacaaaactttttggcagacagatatttgacatttatggatttaatgggctgctgataggctatgtgatctatacactgccagtatcctttttattgatccataatacaatgggatatattgataaaaaattcatgattgtatccagggtcatgggagacaattggttttctacgtttgtgatgacaattttccgccctttggcaggaacactggtggcctcattcatccagtcgttttttctttgcttcacagattttggtattcctgcatctgtgggcggaaaatttgaggtcattgcaagtgttttatatagtcagatgctgggaagtgtcccggattttaagaaaggaagcgtggttgcagtggtaatgctactgccgtctatcatcagtattttattgcttcgttatctggaaaaatataatgtacgctatcagaaaatatccgtaatggaacttccgaaaaatcggaaaagggactggctgtgcggacttggaagcggactgatcatactcggtgtgttgtctatatttgcagtgatctttattgtgccatttgtgcgggactggccgtatcagattggtttctccatggagcattttcgggcagtgtttcaggatgcaggtttaataggagtatataaaaattcgctgtatgtggcatttttaacagctgtttttggaacactgacggcatatggaagtgcgctgatcacggcaagaagcacgcttggaattatagggaagcgaatcatcgatggaattgcgctggtgaccaatacgattccaggaatggtactgggacttgcttttttattctgtttttctggaacagggcttcagagtacgtttgcaattctgattttgtgcaatgtggtgcatttcttttctacgccctatctgatgatgaaaaattctctggagaagatgaacgcttcttgggagaccacggcaatgcttatgggcgatagttgggtcaaaacgattatccgtgtggtaactcccaatgctttgtccacaattctggaagtatttagttattattttgtgaatgcaatggttacagttagtgcagttgtgtttcttgcgggcgcacggacgatggtgcttacgacaaaaattaaagaattacagtattataataagtttaatgaagtgtttgtattgtcccttttgattttggttaccaatctggtggcaaaaggaatcccagcgttggcggcagactggaaacatatgaaggaggaaaaaagaacgatgaaaactacaaaaaaaagaatcttcaaacgagccggggcaacactggcagcaggtatgctggtattttccacaatatctgcagcaggatgctcttcgaaagcaaatgatcaggtcgtcatttattcgaatgcggatgatgaagcagtggctgctatgaaggccgctctggattcgaatggttatgaggggcagtatattttccagacatttggaacgtcagagctggggggaaagctcctggcagaaggaaacaatctggaggccgacttggtcacgatgagtactttttatctggaaagtgcacaagaagagcagggaatgtttgccgatctgacatttgatcccggaacactggacgagtatccgccttactgcgcgccaatcaccgcacaggaagggactctgattgtgaataccgaacagatggagatagaaaatcttgaggtgccaaaatcgatcaaagatttggaaaaaccggagtataagggcaaaattgcggttacagatattacttcttcttccacagcatggcttttgattcaggggctgatttcagaatatggagaagaggactcaaaggaaatcctgacagacatttatgagaatgcaggagatcatttggaagaatcgggttccggaccgttgaaattagtgcgtgcaggcgaggcagcgattggatttggacttcgtcagcaggcagtggcagataaagaaaaaggccttccagtggactacgttgatccggaagaaggaaatttcacactgacagaatcagtagcggttgtaaacaaaagtgaagaaaagaatgcaaaagcaatggaaatggcagagtgcatcattaaaaacggaagggaagaattgctgaaaagttatccaatcccgctgtatgagggagaggctgttccagaaacagaaaaatccggaaatccaaagacattccccgaaaaattgaccgtagatcttttgaaaaaacatcaggaattatcagaaagctgtaaaaaataaaaagaagtgaggaaaagaaacatgaaaaattcagaaactgcaggatataaattattaacgccgggaccactgactacaacagagacggtaaaagaagtgatgctctttgatcactgtacatgggatgatgattataaggaaattacacaaaaaatccggaaagatcttttgcaacttgcacaggtcgaagagtcagaatatacgacagttctgatgcagggttcaggctcctttggagtggaaagtgtacttggcagtgtggtgccaaaagatggttgtgttctgcttttgagtaatggagcatatggagaacgtgcggcaaaaatgtgtagctattatgggatttcatgtattcatgtgacgcaggaatacaatcagacaccggatgtaaaagaagcaaaagatctgttgaacacgcatccagagattacgcatatcatgatgatccatagcgaaacaaccagtgggattttgaatgatgtggagagcattggtgagcttgcaaaaaaatatggaaaagtatttattgtggatgcaatgtccagttttgcaggagtagaaatcccggtaaaaggctggcacattgattttttgatcagttctgcaaacaaatgcatacagggagttccgggattttcgtttatcatcgcaaataaggcaattttgaaggaatgcaaaggacgtgcaagaagcttaagcctggatttgtatgatcagtgggcgggaatggagaaggatggaaagtggagatatacatctccaacacatgtggtgctggcatttgagcaggcaatgaaagagctggaacaggaaggtggaatccaggcaagacatgcaagatatcagaaaaatatggacattcttgtggaaaacttcgaaaatatgggatttcgattgtatgtagataaagcatggcagggaccgattattgcaacattcctctatccggaaggaaagcatgttgattttcaggaaatgtatacttatattaaagagcgtggatacgcaatctatccgggaaaactgacagatgtggatacatttcggattggggtaatcggtgagatctacgaggaagatatttggaaattgacagaaattatgaagtcttatatggaacaagcatagagcaggaaaggaaaaaaataagatgagacagatagaagcagtcatttttgactgggcaggaaccacagtagattatggatgttttgcgccggtgcaggcattcgtggaggtatttaggcattttgggattgagccgacgatgcaggaggtcagagaaccgatggggatgctgaaaatcgatcatatccgtactatgctgcatatgccaagaattcagaaattgtggaaagaaaaatacaaacaggctgccacggaagaagacgtggaaaaattatacagcttgtttgaagaaaagctgatgagtattttagacaggtttgcacagccaaagccgcatgttctggaagtgatcagggagctgcgtgcccgtgaaattaagattggctctacaacgggatatacagatgacatgatggcagttgttgcttcgaaagcaaaagaagctggatatgagccagatacctggtttagtccggacagtgtgggacatgtggggcgaccgtatccgtatatgatcttccaaaatatggaagcgcttcacgtattatccgtagaacatgtagtgaaagttggagatactgtgtcagatattttggaaggaaaacatgccggagtttttacagttggtgttgtggaaggaagttccgagatggggctgacagaagaagaatatgacgctctgacacaggaggaaaaggaagaaaagatcgaagaagtacgtcagagatttcagaaagtcggtgcagatgcggttattttgcatatgggagagctgttgaagcttttataggtataaaaatagagagcaggctcacagctgctctcttgtgttatgtgtgaaatattatttgatctgctgtatacatttctccaaaacatagcggatcggtttgaacaatacgagacatacaatgaaattgctgatacagtgtatgatatcgaatagaagtcctgacgtccaatatgcaaatgcaccggaaatcccgccgattgcaaagtaggggatggtacagagtgctccgaatgtaataccatagatcccggagaggatactccagaaccatacggaatcatttttccggaaaaggagagtgatgagtgcctgtatgctccagacatacaggtagtttatccaccagagtccaaatccatagatcagaccttccagaaaaacaaagatgtaaatgatgaagaatactttctttcgaaacacaagtgtatacacaaggatcaaaagggtgacgatctcaatattgggcaggaaaccaagggaaacctgagcagccagaaggactgcgctcaggataccgtatattacaatttcccgtgttttcattaatatccttctttcaatgtaagctcaaatgcatctccgtcagaaacgggtgtctgatctgcggaagtgttgacctgttctccgccttttgtgatgcaccaccattgttgcttggaatcatccgctgtttcttcatccacagttgtaataaatagaccatattctccagactcaccgtccacgagattttcgctttctaaaacctctcccagatatttggcatctgtgtcaaattcgaagacattctctgtctggtctccgtggatgacagtcactgtaatatgtttttctccgtcactggcagcaggtttcattttctggtataaaaccccggctccaatgcacagcaggatcaagatgataattcctgcaatcagtccactttttttcttcatgtttttatcctttctgcattcttatttttcatttgaaatcataaggggacatcatggttttgtcaagtaagatgaatataaggacgcagaaaatcaattttgataaaatgcatctacggcatcaaaaaatgcttggatattttccagtggagtcatcggaggaatatcgcatccgctggcgatgacaaagtttggatattttccacaacgttccagaagttccagagtttcctggcgtattttttcaggagttccatttcggaatgttccggcaggatcgatattgccaatgacaacggcatcttccggaaggttctttaatgcatcttccacatcaatggcatttccgacgctgtaagctcctacctggatctcattgatattatccagaagtggaacaacatttccacagttgtggtacatgaccagaaaatgatcgtcttctacagcatcccggattttctgaacatatggtgtagaaaattctttgatcagggatggggaaagaagccccgctgcaggctctgcaattgcaattccgtttgcaccggcctctttgaatgcgagtgcatactggatcaaaaaagcagttgccttttccagtacggtttctaccagctctggatcttcgtaacataagatcatgatttctgtcatatcaagcagtcttcctgcaagagagaatggtccgatgattccagctaatactggtctgtcagtgatcaattctgtggcttctttgattcctttgatacattctttggtacgtccggctcccacttccggaacaaccagattttcggcttcggtttcgtcatggatcagcgctgctgttacagtcggaacttcgtcttcattgtagcagaccgggcttccgaaagcttctgcttctacagaaagatccatcagactgaaggctgcgccggtcggaaatcttttggcgattgcctccatacataaagcctgcaaatgtccatcacgtactaattcatcaacggtatgtccgatcatctggattccggggaaagataaaatcggagctgcttttttcttttcggaacggattgtttctgcaacccattgcttcatattcattttcatagatagtgcctcctgaaatacttaatttgttccaagtataacatttttacccatttattcttgtatatatttcggatttttggttatattttaagaaaaattgtgctttttacaaatttttattccgatggaaacagcatatgttccatatagaactcctgaaaatctttgtctggagacagttcaacttcagcggaatgatctatgagttctatccatgttgactgggaatcggatgtccagagactttttaccgcaccattgagcgagctgtttccgacggcgataatcttgtctttgcattcttctgggaaaagtccgattttgacagctttttggatattcagtttgtatccaaacccaccggcaatataaatatgctcaatctctttgtaaggaatattatatttcagacgcagagtttccagtccggcacgtattgcagactttgcaagttggatctcccgtatgtctttttgatagaagtaaattttttcttccaaagccagtggaaatccggtttcaaaatagtcctcatccaacaggccggtttcatcgatcagttctgcattcagaagttcgcaggtactttcaatcactccggtgccgcagattccgaaaggagttttcccggcgatggttttgacatgcgcatgaagggagtcatcaatggatacgctgcagattgccccgggaatacttccggttccgcatacaatatttcccccttcaaatgccggtcctgcagcagttgatgacaccaggagtctgtctttatttccaatcgccatttctccattggttccaaggtcgatcagtatggatacacgatcctttttatgaaagtcaagtgcatataaaccggatacgatatctccgcctacatacgttgaaattccaggtaaaatcgtgaccggacaatctggtatctcatcggagagaagttcttttgcagtggtatgaatggtgtcgagattgaccggtgtaaatggatatacccctaatgtttcacaggaatatcccatcaaaagatgaaccattgttgtatttgcggcaatggtaatctgttcaatcgaaagggagccgttttgagtcagtgcctggatgccttctaacaggcttttttgaatactctgtttcaatgctttcttttttccgcaatttgatgcatcgattcggctgatcacatctgcaccaaaagctctctgacgattgatcgcggtataggtgtcagcgatcagctgatgtgatgtgtcaaccagctgcatggcaatcgtcgttgttccgatatccactgcgacagaataggcggaatcattcgatacgggatgatcggcaggtgatttttgtgtatcagccacaacatagatgttttcctcgttggtcttcagagaaacgacacagtcgtgggaaagacgcatacagcatgcgagccgccagccgttctccagttcttctgctaaaaaataattccgttcttctgcagatggtgcatcggctccttttgtcacctgtaccttgcattttccacaggttccgcgcccggaacagatggcaggaaggaagatctcatgtttctgcagtacggaaaggaggaattccgattgttttgcctgaaggattcgttcttcatttccggtgcataccgtgacagccactttgttctcctgtctgtttttgcaggcaaaattatcacagtgagcacaatcatgtcccgcagcaaaacgggttgacttttcatccaggagatagacgagacaaagtgtttttaccggatcgtacatatagctttctttgattccgattccctctgtgtgagcattagttgcaagatatgcttctttttggacactcataggaacatctttcggtgcttcgactcttccgaggattcctttcccactttttttacacagttcgatcgcggtgtgttccaactgctgatccatctggaacaggtaatcatcagaaatggcatctacaagcattcctttgagataatcaccttctgcaaagaactgggaactccattttcccatttcttttccaatggagcagatgccgtataagacatcggtgatgatttttccgttgcgtgtcacagaatgttcgttcagacttccaaaattcaacagtgcaaccggtttgatcttctcctgtgcagccggcagcaattcttctaattcttctaatatttcgtcatacaaatcgcttggttttgtaacatccagaaatcgaagcacattctcgattgatatttctatattaaaattcgttcgtttcattctttccattcgcttctactttctctttataataaaataaaccctttttatgaaaaaagagtttccggttcgttctgtctgttgattacagtctgtctcccacccaaggcagagctgtcttaaaactgatcaaagtatcctgactcacagttcatcctccaaatcccttctcgtcatattgacaatggttctgatttttcgtccctgtttacagtaggggtaagcctgtaccagaatcgcactggtttccatttttcacagtattttgttgtgtatcccgaaaaagggattatttttcagtaacggctgtttttgctacatctgcgcaagttgctgcatccggtgtgtagtaatctgcaccgatctgatcgcagaagctctgatttaccggagcacctcctaccatgacaacatatttatcacgcagatctctctctttcagtaagtctatacaatcctgcatttttggcattgttgttgtaagaagtgctgacatacagataatatctgcttcaacttcttctgctttgtcaataaaggcagctggttctacatcgacaccaaggtcatggatttcaaaacctgcaccttttaacatcattacaacgaggtttttaccgatatcgtgtaagtctccctgtactgttcctacgacagctgttccgacaggttcatttccaatctcaatcagttttggctccaggattgtaaggccggcattcattgctcgagctgcaacaagaacttctggaacaaacacctcattgtttttaaattttgcaccgatgatggacattccgctgagtaatccttcgtttaaaatgacttttgggtcaacttcttcatcgattgcctgttgtacgagtgcttttacgttttttgcacgtcccttttgcagaaattctgaaatttcctgaactaattccatgttaattcctcctatttatttctttcatttgtcttttattatactgatcagaaaaataaattttggtatttttttaagattattataaatatatttctttcttttgtttcttttttgctatttttaccaaaagtatgttatgatgaatacaagatttagaaacttatagttccaggaggagattcatgaagccgttattgtatacatttgtgtcggaggaaacattacattctatggcagttacctttcatgcctgtgtaaaattaccgatacagattatcaatgaaaatgggaaaactctggtttcagagggcgactcaccgaagttctgccaattgtttcagaagcatctgcccgcatatgatacctgtgaaaagatgcatatttcggcaagtaaaaaagcaatcgacctgggagaaccatacatatttgcctgtcatgcagacttaaatcatattgtgtatccattgatcagcaagaaagtatttctgggttccatacttgtaggtccatttctgatggatgatccagattctattttgatctcggatcttacaaaaaaatatgagatatctacagaggacgcgctggagttgtatgatgagacagaaagtatcccgattatcgcaccgtctctggtcaaccatgtgagccatttattgtattatctgttttcgaatctgatcgccgacagtaaaaaagaactcctgaaaaataatgaaaaattactgcagcagtcgcggatcaatgaatccatccagaggtataaagcagaaaacttaaagaatacgacatatccatatgaaaaagaaaaagaattgatcaatcaggtgcagaaaggagatgtgcgtgcggcatatgcgactttgaacgacttgttgggatatgttttattttctcagggaagcagtctggaaattgtaaaatcaagggcaattgagctttgctctctgttgtcgagaacggcaattgagcggggagctccaacagatagtattttaaaactgaacaatcattttctgcagaacatccagtccattcatacaatggacacactttgctataagctgcaggaaattgtagaaacgtttacagaaagtatgtttcattataatcctactaaaaataatgaagtgatcaagcgtgcgctgttatacatatatgatcattttaataccgcacttaccttggaagaagtggcagaatatgtacatttgcatccgtcttatttttccagtttattcaaaaaatcaacgggttcttcgtttaaagagtatctgaatatggtacggatcgaggaaagtaagaggcttttgagcaatacagagttttccattattgatattgcggttgcggtaggatttgaagatcagagttatttttcaaaggtgtttaaaaaatatacaggactgacaccaaaacaatttcggtgatcagcccagtgcaggcgatatgaagaaaaaattaccagttgacagtctctttgttttatattagaataccaaacgtaacatttttgtaatatttgtaataattatgaaaagtagttcatataatttacaagaactacgtaataatattgcaataatcaggaggttatttatttatgaaacagagaaaacgatggatgatagtacttactgtatggacaacagcgctgttgtttgcagcaggatttacaagtcaggcgtctgcttcaggttcagagatgattcaggaacgtgatacaacatatacaacaggagtaaggactgtggctgcggtagtagagaatattccggcagaggcagtggaacttaccaaagcagaagcaaagaaagcgcaggaagccagagagaaggcagaagcagaagcaaagcgaaaagcctgggaagaggcggaacgaaaagcagcagaggaagctgcacgggcacagatcgcggcagaagatcagaaacttctggcatcgatcatcttctgtgaggcaggaaatcagccttatgaaggacaggttgcagtgggagcggtgattatgaaccgtgtcagaagcggagcgtatccgaacagtatttctgaggtgatctatcagtccggacagttcggaccggcgatgacaggctggttggatattgttcgcagttcagcgggatatacgcagacgactatgcaggcagcggcagatgcgatggcaggagtcaatccgatcggagactgtctgtattttggaaatgggaattatggaatccagattggagatcatttcttccactaattttataaaaatgaaagacggttgtgtctaggagcagttcaatgtccagatcacaaccgtcttttttgatgtgcagatgattttatagctgtattttcgaaaaagcttccgcaaaggcattgttgatcggctcttttacctcttttgcctgtttccgcaaataattattcacatcttttttgctggcgccttttccttcctttttctttcgatcttcaaaggagctcagcttttctttgtgtccgcaggtgcatacaaatctctggccgtctccttttcctaccaggtccattttcttatgacataccgggcagcgggcattggtatggcgggagatggtttctttgtgtccgcactcccgatcttggcagacgagcatttttccgtgttttccgttgacctcaagcatgaattttccacattttggacatttggtgcgggtcatgttatcgtggcggaaggtaccgtctgcagatttgatctcctgaatgagtgctttggtgtaatgttcgatctctctcataaaggctttatcggattcttttccttttgcaattgcctgcaggcgcatctcccaggaagcagtcagttccggactctttaaatcggaaggaacgagggagagcagttgttttcctttggaggtgatatgaatctcatttccctttttctccatgaggaaactgttgaataatttttcaatgatgtctgctctggtggcaacggtaccgagtccgccggtttctccaagtgttttgaccacgtcttgatctttatgacggagatatttgacgggattttccatggcggcgatcagagtaccttccgtgaaataagcaggtggtttggtcttgccttccgtaatggtgagtgcggtgacaggaagtgtctccccttttttcaaatccggcagagaaatctgggaaaaggcagtctgttcttcttcctcctctccatctgtgtagccggattcgtaaacttctctccacccggcagactggatgaaattccctttggcgctgaagcgttcttctccgatggtaccgctgatagaagtctcttcatactcacaggccggagagagaactgccaaaaaccggcgtacgaccagatcgtaaattttgcgttcttcattgctcatatgatcaagctgtacaaactgttctgttggaatgattgcatggtgatccgaaactttgctgtcattgacaaaagatttatttgccgtaaggtgctgcatggaaagccgtccggcgatcttgctgtaaggtccgacggcgcaggattttaatcgctcctttaacgtcggtacaatatcggtggtgagataacgggaatcagtacgagggtaggtaagcactttgtgattctcgtaaagtctctgcatgatattgagggtctgctttgcggaaaatccaaatttctggttggcctcccgttgaagtgcagtcaggtcatacagtgcaggcgcaaatgtctttttcagctttttgtgtacatctgtaacaagcagtgacgcagcggcagtctgtttgatcgcctggatgcggtctttgtcaaaggagcgggaagaaccggatttcgtatctgcccatgtaaatgtgattccaccgacggtggctttcagcccgtaataaggaacgggtttgaatgagcggatttcctcctctctggcggcaatcatggcaagcgtcggcgtctgaacacgcccgcaggaaagctgtgcgttgtatttgcaggtcagagcacgggtggcattgatcccgacaacccagtcagactgtgctctggcaacagcggcatggtacagcggttcataggatctgccggggcgaagattctgaaagccttcccggatggctttgtctgtaacggaagaaatccagagtctcttcagtggcttttgattgcctgctttgtcaagaatccagcgtgctacaagttccccttctcttccggcatcggttgcaatgatgatatccgagacatcctttcgaaagatgaggtctttgacagcgtggaactgtcgtccggtctgtttgatgaccaccagtttccagtgttcgggaagcatgggaagggtatccatattccaggtcttgtactgctcgccgtactgttcgggatcggccagtgtgaccagatgtccaagtgcccaggtaacgatataatccgttccttctatataagtatttgtttttttattgcagtgcaaaacccgggcaatatctctgcccacagaaggtttttctgcaatgaccagatgtttcatagtgtttctctctcctgtttttatagaatattcagacgttgtggaagccttttccgataatctcacttgtgttcgaaatcagaataaaagcagagggctcctcgtctttgatatagttacggagccggacagcctgtgggcggttcagtgccgtaaaaatgacatatttatcttttccggaaaatgcaccctgtgcatggcagactgtggcacttcggtttaattcctgcacgatgaagttgcagatcggctttggattgtcgcatactacattgaagtatttggaaagattgaaactttcgataaaggtatcaatcataaacgaacggatcgcaagtccgaggaaggaatagagtccggtcgcaatgtcaaacataaagcagccggcaacggtgatcatcacatcggtgatcaaaagtgcatgtccgatatctacactggaatattttttcaggatcatggcaatgatatctgtacctccgctggaagagccgatgttgaataaaatcgcagaaccaagagaaggaagagcgatggcaaaacaaagctccagcatgggctgatcggtcagcggggcatgcattggataaatccgttccaatgcagacagggaaacagataaaagaatgctgcagtaggcagtttttgcggcaaattttttgccaaggataaaaaatccgatgaccaaaaggaccatgttcgtgataaagttaaaatctcctgcagacatgaggcctgttttcgcaacgagaactgcaagacctgtgattccgccaaatgtaaaatgatttggaaatttaaaaaagtatgttcctgcagccatcaccagtgtactgaaggtcagcaggaaaaagtgtcgtagtttactcttcatgtcgaatacccccaaataagataagaagattgtagcttgtgctttctcaaaagtcaacgaattatcatgggattattggaaatactaactttcaacaaggagggtgaaaacatgtatcaggagttaccgattcaggatatttacgcaagagaaattctagactcccgggggaatcctacggtagaagtagagatactggccggggaacggatcgtagggcgttcagcagtgccgtccggagcgtcgacaggaaaatatgaagcagtggagcttcgagatcaggagaagcgttatggaggaaaaggggtagaacaggcggtacggcatgtcaatgaagaaatcgcaggagcactgattggaaaaaatgtgctggagcagacggaaatagatcatattttaaagaaacttgatggcagcagagataaacacaatctgggggcaaatgcgattttgggagtttcattggctgcggccaggacagccgctgcagcacttgggattccactctatatgtatcttggaaatgtaggagaaaaggtgatgccggtcccgatgatgaatgtgttaaacggtggggtgcatgcagataataccttggatatccaggaatttatgctggttccatacgggccggagagttttaaagagcggttacgtatgggaactgaaatttatcatgtacttcgaacacttttgaagcagaaggggcttacaacagctgtcggtgacgaaggtggttttgcaccggaattgagagattccagagaggccatcgaatttttgcttgaggcagcacagcaggcaggataccagccgggcaaggatctggggattgctctggatgtggcatcttcggaattgtaccgggagaaagaacagaagtattattttgtgggagaaagcaaaagtactggaaaaaaagttgcacgaacatcggaagagatgatggagtattatgaaaaactgatcctggactatccgatttattcgattgaagatcctctggatgaagaggattgggatggatggagcagactgacagcaagaatcggagaaaaagtacagcttgtgggagatgatctgtttgtgaccaacccggagagagttgcacagggaattgtaagaaaagcagccaattctgtgttgatcaaggtcaatcagatcggaacgctgacggaggcggcaagagcaatcgagttggcgcatcaggcagggtatcgaactattatgtcccatcgttccggggaaacagaagatacaacgattgcagatctggcggtggcatttcacacggggcagatcaagaccggggcaccgtgccggtcagaacgtgtggcaaaatacaatcaactgcttcgaatcgaagacaacttgtgcagaatcatgcgttaagagcatcacactggagagaaaaaatctttccggtgtgtttttttataaaaactgtatatattaaatattgacagtaaatacagaatgagatatactgtacctataagataagtacagatattacaagagaggtgatgaagtggagattattttaagtaattccagtccgaaaccaatttatgagcagattgtttctcagataaaggcgatgattatgaacggagagttaaaagcgggggattccatgccatctatgcgtaagcttgcgaaggagctgcatgtcagcgtgatcaccacgcagagagcatatgatgatctgcaaaaagatggatttatcgtgactgttccggcaaagggaacgtttgtatcggcacagaatcaggattttatccgggaggagaaccgaaggcggatagaacagcttttgacagatgctgtaaatctggccagggaaaacggaatcgaacggaaagaactcaaaacaatagtagatgtattgtatcaggaggaggatgtgtgatggaatacgcactggaaatcaaaggattacataaaacatacaaagaatttgaattaaaagatatttctctggaattgcctcaggggtgtgtgctggggttgatcggagagaatggagcaggaaaatcaacgctgatcaatgcaattttaggactcattgattctgacagtgagacactgaagatttttggaaaagagctgtcagaacatgagaaaatgatcaaagaagagattgcggtgatttttgataagacctgttatgatctgaattttacgccgctgtttgtcggaaagattttgagtaacgtgtatgccaactgggatatggagaaatatcagagatatctggatcggtttggactgccgaagaaaaagaaactgaaagaattttccaaaggaatgaagatgaaaatggagtttgcagcagcgttaagtcataatccgaagctgctgattctggacgaggctacaagcggtctggatccggtgttccgcgatgagattctggatattttaagggagtacacagaggatgaagagcatacgattttaatgtcttctcatattaccagtgatctggacaagatttcagattatatcgcatttattcatgaaggaaaattattctttacaaagacttacgatgagatccaggaaaattacgggattttaaactgcggacagagaattttcgatgcattgaatcgagatgatattgaagcctatcgcaaagatgcctatggatatcgtgtgctggtgaaaaataaacaggggatccaaaaggtattctctgatctggagattgagcctgcaacgattgaagatgtgatgttgtattgcgtgagaggggagaaggcagcatgaaaggaattattttaaaagacttatatgagggattttgcctcaaaaagaatatgttgaattggatcatttctatgatctttatttcagtgctgacagcggtcagtggatttatgagaggaacttacggctttttactgatcgtggtgctgttgtttcctctgatggggagttctctgctgcagcaaacgatcgagcaggatgagaagtctgagtttgaccggatccagcttacttatccactgagcaaacgggagattgtcctgtccaaatatctgggcggactgatcgtgcagggaggaatgaccctgtattcgtttctgtttttgttgatctatgtgtatgggtatcagaccattactttaggagatgcagttcctgcatgggcaatgggagcagccgttgggatgatctattttgcagtcagttatgcagtgtatttctggcttggaaatctcaaaggggtgatctttacatttctttccatgatcatttttgtagttgcctttttattcagtgtgtggaatatcggactcaaagaaatgttgcaggtggataagagcatctgggtgctgtgtctctgggggatggcagtgatgtttatggcacttagttattggatatctgtgaaaatttatgtgaaaaaacattcttaacaggagacatacagaaagctgttactttacgatgaagaatcgtgaaatagcagctttttttggtgataaaaatttataacccaatatgggataattacaaaaaagtaaaaaattcttatagattttattctccatgatatggttcataacaatccgggaatggttccctatgaatctgcgtatcaaagcccggaatttttaaaagaacgtggatatgacggaaaggtaaataattttctatatcgtacaaaaacagtaaaattatgaaataaaatagtaattctgtaaatttactttcaaaaatgagtgtgttataattgaggaaaatcttttgttaagacgtaggaggaggtaggaagaggtatagtcagtaagatttttgtttaaattttgagaggaaaaaggcatagatgaaagcgagaaaaaagaaacagacaaaacgtgttttggccggtacacttgcagcagtcgttatggcaggtgcagttccggtttttgatgtgtcggttcatgcagaagaagctcaggacaggagtgaattaaaactgagatatacaagtgcagcgccggacagttatgcaggctgggaaaagtggtctcttccgattggaaacagcggaattggagccagtgtgtttggcggtgtagaaagtgaacgcattcagttaaatgaaaaatcactctggtcaggaggaccgagtgagagccgtccggattataacgggggaaatctggaagaaaaaggacgaaatggacagacggtcaaggagattcaggaattgtttgctgccggggatcagaatgcggcaagcagtaagtgcaacgatctggtcggagtatctgatgatgccggggtgaacgggtatggatactatctcagttacggaaatatgtacctggacttcaaaggaattacggacaagcaggcagaaaactatgagagaacactggatttgaatactgcgattgccggagttgagtatgataaagggggtacccattatacaagagagaactttgtaagttatccggataatgttctggtgacacgtttgacagcagaaggtgaagatgcgctgaatctggacgttagagtagaaccggacaatgcgaagggaaatgggagcaacaatccacagccgcagtcttatcagcgggaatggacgacaaccgtagaagacgcggtgatttcgattgatggacagttgaaggacaaccagatgaaattcagctcccagacaaaagttctgacagaagggggaactgctgaggatggagaagaaaaagtaacggtcaaagatgcaaaggctgttacgatcattacttcgattggaacagattataagaatgagtatccggtatatcgaacaggagaaagtaaggaacaggttgcagcaagagtccgcgcgtatgtggataaagcagcagatactgtgaaaacagattcttatgatgcgctgagaaagacgcatgtaaatgattattcttctatttttggacgtgtaaatctggatttgggacaggtgccgtctgataagacaacagatgcgctcttaaaagcttataacagcggttctgcaagtgagcaggagagacgttacctggaagttatgttattccagtatggacgttatctgacgattgagtcgtccagagcaacgcctgcagatgatccggcaagagcaacgctcccatccaatcttcagggaatctgggttggtggaaataactccgcatggcatgccgactatcatatgaatgtgaatttgcagatgaattactggcctacatattctaccaatatggcagagtgtgcacagcctctgattgcttatgtagattcgttgagagaaccgggacgtgtgacagcaaagatttatgcaggagtggaaagcacggatgcaaatccggaaaatggattcatggcacatacgcagaacaatccatttggatggacttgtccgggatgggcatttgactggggatggtcaccggcagcggtaccgtggattcttcagaattgctgggaatactatgaatttacgggaaatgtatcttatatgcgggattacatctatccgatgatgaaagaagaagcaaaattttacgaccagattctggtaagagatcaggaaggaaaattagtatcttctccaagttattcaccagaacatggaccaagaacagcaggaaatacatacgaacagactttgatctggcagttatatgaagataccattaaggcggcagagactctgggagtggatgcagagctggtagcaacatggaaagcaaatcagaaagatttgaaagggccgattgagattggtgagagtgggcagatcaaagagtggtatgaagaaggcgccgtaaacagtatgggacagggatatggacacagacatatttcccatatgctgggacttttcccgggagatctgatttcagccgatacaccggagtattttgaggcagcaagggtatccatgaacaaccgtacagatgaaagtaccggctggggaatgggacagagaatcaatacatgggcaagactggcagatggaaaccgtgcatataagctgattacagacttgtttaagaatggtattatgaccaatctctgggatacacatcctccgttccagattgacggaaactttggtatgacatccggtgttgcagagatgcttttgcagagcaacatgggatatatcaacatgcttccggcattaccggatgcgtgggcatcaggaagtgtaagcggactggttgcacgaggaaactttgaagtatccatggactggaaaaacaaacatctgaccagtgcagaaatcctttccaataatgggggaaaagcaacggtcaacgtaccaaatgcatcttttgcaaccattacagataaagatggaaacagagtcaatgtaacagtagaatctcaggacagagtttcttttgatacagtggcagggcagtcttattatgtaaaagatattccggtaaaaggggatgctccaaccggattgtctgcaaaacgtacagatgacaagactggaaaactgacctgggatgcagtagaagtaaaacaggataaaaaagacaaaaaagaagaaaagaaagttacatacaatgtatatcgtcagatcgagtccggagatgtgcagaagatcgcagagggaatagaaaaggcggaatacattgataaaaatgctgagaaagcatttggcaagatttattatcaggtgtctgcagtgattgatggaaaagagacaaaactcagcgcaaaagcagaactgacagaagcaatcggcgcaggcaagattgacaataaagatcctcacatcgtatacagtggtgcatggggagactgggacaaagccaatgaaggcaactataaagataccatcaaatatctgaatcatccaacaggaacagaaacagtaaaactggagtttattggaaccggtattgaagtgatcacatgtaaaaatgcagaccgcggaaaatatgaagtctttattgatggagagtcttgtggtgaggcagatacttacagcaaaacaacagaccgtcagcaggttgtatttaagaaagatgatctaaaacacggggcccatacgttggaactgaaagttttaaacaagaaaacagatgcaagttctggtacaaaggtagaactggatgcgttgaatattctggataatactttggtacttccagaagaagtgaaagtgtcgacggtttccggtattacaacgatcggaaaagaaggtacagtacagatgcaggcaactgtaacaccgaaggatgcaaaagataagagtgtaacatggtcctcttccaataccgatattgcatcggtagatgaaaacggtttggtgaccgttcacaggaaaaacggggaagtcacgattactgcagcatcaaatgcaaatccagatgttagtggaagttgtaagctgacagtagcacttgcaggagatcttggatctggagaaaccatcgtagaagatgcatcggaagacggaaaaagaaacgaaaacattaagtggagtggttccgagtggtctacatgggcaggagagccggagaagcaccatggaaaaacaaaaacagaagcgacaggcgtaggtaaatattttgaatatacatttactggtaccggggtggaagtttatgcacagaagcatgcaaattttgcaagctatgatgtgaaaattgataatgaggaacctgtgaaagtatcattggatggttcttcaaatggagaaccacagcagaagatttttgaaagaaaagacttgaaaaatggttctcacacaatccgctgcacaattgttgcaagaggaaacagcaaacaggcaaaccttgattacttaaaaatctttgcaccggtacaggcagcagaggtgaacaaagcagagcttcagacagcaatcgaaaaaggagctgggctgctggaagattcttatgatgcagaaaaatgggcagagtttaagaaagcatacgataaagcagtagaagtcatgaatgatgcaaagactgtacaagatgcagcagacaaagcaacagaagcattaaatgcagcaattgcagcgcttggtgagccgaatgttccggaaatcggtgaagcagcaggaagagttgtttatgctgagagtacatccgtagtactggagtgggatgcagtcaaaggtgcagcctcttatctggtaaaatggaacggaaatgatgaaggcgtgaagacatcagatacacggattcgtattgatggactggaatcaggcgtgacatatgactttgacatttttgcgctgaattcaaatgaagtgccatctacaagtgcgattgaaattcatgctgtcacaacaacagatgtaataagaccgggaagtgtcacagaaatgaaagtaacttctctggatgagacatcagcacaattgacatggacagcaccggcggatacggatgtggtaaaattcaatatttatcaggacggtgttaagatcggtgaaagtgaaacaccggaatttacgctgaagaagctggaagttggaatggtatatgaagtgagaattacagctgtagaccgttcaggaaatgaatctataccggcaccgtttatgtttacattcgcagcaccggaaaaagagacgtttacgctgaaagcagaagcgaatgatgaaaccatgggaactgtagcagtagaaccacagcaggattcttatgaagcaggaactgaggtaacagtcaaagcagaagccaaagaaggatatacattcgtcaactggacaaaggccggaacagaggaagaagtcagcacagaagcagaatataagtttgcaattacagaaaatacagatctgaccgcaaactttatcaaagaagaagtgcaggaagaaatcttccacgtcacgatcaagaccaatgacaacagtatgggaattgtaaccattgattccacagacggaagctacaaaaaaggagaaaaagcagaagtcatcgcagttgcaaatgaaggattccgttttgtaaactggacagatgcagaaggaaatgtgctcagtgactccaacccatatgtatttgaagtgacaaaagatgtggatctgactgcaaactttgaaaagattccagtggagaaatttacatttacagccgcagccaatgatgagagtatgggatctgttatcgtagaaccacagcaggattcttatgaggcagggacagaaatcaaagtcagtgcagttccggcaacagaagactacgagttcgtaggcttcacgaaaaaaggaacacaggaagtggtaagtaaagacaatccgtatgtattccagatccgggaaaatatggaactgactgcaaatttcaaagaagtagaacattcttatctgatttatgcagagactgcagatgtgcagatgggaactgtcacaatggatcctgcaaacgaaggaaacatttacaaagagggaacagagatcacggtgaaagcagagccaaaggacggatatgagtttgcccagtggctggaagtgacagaagcagatggcgaagaagtcctgacaccagtagaaggcgctcaggcagaatacaaattccatgcagagtcagaccgtgtactgcgtgcacagttcagactggctccggttccggaaacatattaccgtgttgtggtgcagtccagcgatgaaaacatgggaacagtttccatggataaagaagacggtacatacaaagagggtgcgacagcatctgtgaaggcagaagccaaagaaggatttgaatttgtgggctggaaagaaaaaggacagaccgaatatgtatcgaaggatgcagaatatcagttcaaagtgacaaagaacatcgaactgaccggagaattcaaagccgtggaagcgccgcacattccgagtgcacaggaaatcttgcatgatatcctggtaaactataagattccatcagaagtgaaagcaggaacagaaacattggttctgccggaagttccggaaggaagtaagatcgagattgtggcagtgaatccggaaggaatcattggactggatggaaaggtaacaacaccggaaaccgatacagaggtgatcgtgaccattcaggtgacagatacaaacggagcaacagccaaagctgatgtgaaggttctggtcagaggagaaaaagcggatccgaacccgaatccggatccggacgacggtaacaacggaaatgataacaacggaaatgataacaacggaaatgataacaacggcggaaatgacaacaacagtggaaataataacaatggcggaagcaataacagcggaaacaataatacaggaaacaatggtggaagcagcaacggcggaagtcataacaatggaagtacatccggctcacacgctcagagtgtgcagacaggtgataatgccaatgtaattgtgtgggcagtacttctggtggcagcaatcgcagcagtttgcgcagtcgtgattatcagaagaaagaaaaaataaacaggattgtaaaatcctgaaaaaagcgatggcggatgaaagaaattcttttatccgccattttatgattgaaatctattgcgaaaaggtaagctttgtggtagaatatagaaggttatccacaggaggtgtgaacgtatggatattttgaaaattgtgttgatgattatttttgtaatagattgtattgccttgtcagcaattattcttcttcaggaaggaaagtccgcaggacttggaacgatcagtggagcagcagattcttattggggacagaataaaggtcgttctatggaaggagctcttgtaaagtctacaaagtttcttgcgattctgtttttagtacttgcagcagtgctgaatctgaaagtatttaactaagaaaaagcgataaaacactctatgcagaaatagggtgtttttcttttatgaaaaatcaaaaagagccgaatagaaggcgggaaaagagggattactatgatagggaaagaaggtgaacgaatggagcatacatttgaaaagagaaaaaaagtaatttacgatctgatctgtgatgatctgtatgtgccgatgaagctcaaggagatcgcaatgcttctacagattccaagagaacagcggcatgaattgaaagaggtactggaatcactggaggcggacggtaaaatctatgtttccaagaaaggaaaatatgtcaaagggcagccacagtatttaaaaggtatctttcaggcaaatcttcgaggatttggatttgtactcagagaagaggaagaggacgtatttattccggaagagaatatcaatggggcattccagggagatgaggttgaatttctgatcacgaagtctccggaaggcagacgaaaagaaggaaagatcgtacgagtggtatcgcatgggacgaaaaaggtgatcggtctgtatgagaagagcaaaagttttggatttgttcgtccggataaccagagatttttaaaggatatttatattccggcaggaaaagaaaagggtgctatgactggccataaagtcgtggtagaactgacttcttacggtggggagaatatgaaaccggagggaaaagtagtagagatcatcggacatatcaatgatccggggacagacattatgtccattgtaatgggatatgatatgccggtggaatttccggagaaggtgctgaatcaggcagaacgtgtcgggaaagatgtcagtgaagcggatatggcaggacgtatggatttaagagactggcagatggtgaccattgacggagaagatgccaaggatctggacgatgccgtctctctgaccaaagtggagaatggatggaaacttggtgtacacattgcggacgtgacaaactatgtacaggaaaaaagtgcattggatcgggaggcattaaagcgcggaacaagtgtgtatctggcagatcgtgtgattcctatgctgccgcataagctctccaatggaatctgctccctgaatgcaggagaagaccgtctggcgttaagttgtatcatgacagttgacaaaaaaggggagattgtagatcatgtgatcgcagagactgtgatccgggtggatcagagaatgtcttatacaagcgttgcaaaaattttggaagcacaggatgcgcaggaacgagaaaagtatgaaacgcttgttccgatgtttgaacagatggcagaagtttcaggacttctcagagagcgccggaaaaagagaggcgccattgattttgagtttccggagacgaagattgttctggatgatcagggacatcctgtggaattaaagccctatgagcgtaatgttgctacaaagatgatcgaggattttatgcttgcggcaaatgaaacggtggcagaggaatacttctggagagaaatcccgtttttatatcgtacccatgaggcgccggaagaagataaggtaaaaaaattaagcacatttatcaataattttggatatcacatccatttgggaaatgaaatccgtccgaaggaaatacaaaagcttttggaaaaggtggaaggaactccgcaggaggcattgatcagcagactggcacttcgttccatgaaacaggcacgctacacaccggaaaatgcagggcattttggtttggcagcacagtattatacacattttacatcgccgatccgacgttatccggatctgcagattcataggatcatcaaggagaatctgcggggaaggcttggcgctgaacgactggcacattatgaaaagatccttccggaagttgcgtcacagtccagtgatatggagcgcagagcggaagaggctgagcgtgaaacggtaaaattaaagaaagtagaatacatgcaggatcggatcggagaggaattcgaaggtgtgatttccggaattacaaagtggggggcttatgtagaacttccaaataccatcgaaggactggtacatgtggtaaatatgaaggatgaccattatgaataccgggaagatcagtacgaactggtgggagaacgtttccacaatgtgtataaactgggacaaaaagtgtgggttcgtgttacaggtgtggatcggcttcagagaaccattgattttgagttttgcgaagaataggagccttagtatcacagagtttaacgaaaagaagagaggaaagtgcgatggcaaaaaaagaaggcaaattgatcgccaacaataaaaaagcatatcacgattattttattctggaaaaatatgaggcggggatcgtactgcacggaacagaggtcaaatctttgcgtatggggcagtgcagcatcaaggaagcatttatccggattgaaaacggagagatgtttatttatggaatgcatatttctccttatgagaaaggaaatattttcaataaagatccgctgagaccgagaaagcttttactccataaaaaggaaattgataaaattttcggaaagatgaaggaaaaaggaaatacagttgtgccgctgcaggtatacttcaatggaagtcttgtaaaagtagaagtgggacttgcaaaaggaaaaaaattgtacgataagcgggatgatattgcaaagaaagatcagaaaagagaagcacagagagaatttaagatccggaatctgtaggaaatatgggtacagttcgtacagtcacaaaatatgccatcgggtggaagttattcttccagtccgatggcttttttaatttcggagagattctgtccggtaaagaccatcccattcattcccagctttttcgcactttcaatattttccggcttgtcatctatgaaaaagcaatctgcgggatccagagaaaaggtatcgaacagatactgataaatctccggatttggtttgaactttcggatagatccggaatagacggcgccatcaaataagcgggtaatctcaaagaagtccgcatgttcctcaaagaaaacaggggcattggagaggatgtaaagccctgtatgttgttcttttaatgtgtggatcatatcccacatcggctgaatcgggatcatgtgctgataccaggttgcaaaacatttgcgggcagtttcatgaagtcgttccggtaaacgggcaaaagtctccttttggtattcttcataagaaatacttccttcatccaatgcctgccagttgtgatagatggcatcctgcatcatcgggagatctttttctgtacagtaggaatgaagaagactcccggtatcgaaactggcaagaacattcccaaaatcaaaaatcatatgtttataattcataagcaaactcctttcagaagtatcgttcacactttgtttatcatagcacaggacgggagaaaattcatctatggatcttaagagaaaggaagtgtgcttttgggaaaagtgtgataaaataagcaaaagtatgaatttcaaaggttccttttattccacgtatgtatcgtgtgaatcgatgaaaaatgaaattgaggtggaagtgagaaaacaatgaagtataaccatgaactgattgtgccggatgaggggctgcctttcaagatgtttatttttgaggggaaggaaggaaattataagcgtgagacgcactggcatcgttctgtggagatttttgcggtctgtgagggtgagctttgcttttatattaaagaaaaaccgtatccgcttatgcagggagaatttatgatcgtgaattccaatgaggttcattcggtgcattctccgaagccaaatgaaacgatcgtactgcagataccgatccggttgtttgagaattattttacaggcgagggatttatctggttcacacacaatccggtggagcgggatgaacggctgatggaattgatccgtcagatgtacgaggtgtacacaagaaaagagagaggctatgaaatggaagtgaaaggcctgttttatcttgtcatgcatttgcttgtatccgagtatcagcggattgatgtgacagaagcacagcttcggaacaataaaaatctgaatcgcctgtctacgattacttcttatatcaaagagaattatgcatcagaaatgtccctggaaagtctggcaaagatttttggatattctccgacgtatctttccagaatgtttcagaaatatgcgggggtgaatttcaaagcatatctgcaggatatccgtctgagatatgcatggaaagacatcaaagacagcgataagacgttcagtgagattgcgcttgcgaatggattcccaaacagcaaggcacttgcccgtgcattccagaaaaaatacggaatgctgccaagtgaatatcgaagtcagagagatttgcggtaggtaccgggagtcatgcctttgcgttcacggaagattttgctaaaataagcactgtttgaaaatccacaggacagtgcaatttctgtaattgtcttttgtggattttttaattctttttctgccgcctggatacgataatctgctaaatattcaaaaggagttttttgaatggtatgtttaaaacagcgtgtacattcccgactgctgatagcagcagaacgggcaatttcttccagagagatcggatgcatataattttgctggatgtaggagagcatggtttggattcgttcctgttccattggttttatcggcaaggtctttgtcttcaataattcaatttctgaaattagaagaagccagatttcggaaaatagattacgaatctgaaattcttgatccggttgttcctgcagagcagatgccttctgaagaagagaaaggatcgttttctgtaaagctgtagttccatgtagctcaacaagatcaaagcgtttatcctggattacaggggcaacatatttggtctcaaagatacttttaaaatgtccgcttaaaaaaattggatggaataagtgtgcgcagtaaatactgttcggattttttgagtcagactgcatagaagcaagaacattgggattgataaagaaaccttcacccgagtgaaagtggtaggtttgattgacggtgcgtacttcaagattaccttgttccagatagccaaattcgacttcttcgtgccaatgccatggaatctgagtttgagccatatttgtgcggtgcatgatgtaaggatattccgtggtaagtccggcaacttcttccaattgattatttgtgatgtgaatagaatgaatttccatatacagtgttctccatgttgtcctgaaaataataatataattacattttgtctctatataaataaaatactgcctaaaaataatataaaatcttatatttttgaaatataatttcattatagaaaagaaacgtaagaatgtaaaggaaagaggtgaaaaaaatggtgtcagcggcagttattttatttgcactagtgatgctgttattattttattttgaagagaaatcgagagattaagaaaagagcaagaaattgacataaaatagataaataataggtcgcaaaagcgaaaaaaagttgataaaatgacctcaatgagaaacttggaaacaagtttttgattggaggtcattttttatggaaattcagaaagttacagatgccgcatttgtaaaatatggaaaagtggtggcggacattccagtagatcggattttaaaagagatggagcatacaccccttccgcaggaggtgatttatgtcccatcggtggaagcgctggaagtccttccggatgcggcggcagtccgggaaaaaggctttggaggactgccgattcagattggatactgcaatggaaataataaaaagctgaatgcattggaataccacagatcttcagaaatcgatattgcagtgacagatctgatcctgttgcttggatgccagcaggacattcaggcagatacttatgatacagcgcttgtggaagcgttttttgttccggcgggaacagcggtagagttgtatgccacaacattgcattatgcaccgtgcaatgcaaaagagggcggattccgctgcgttgttgtgcttccgaagggaacgaatgaggcattgccgtttgttccggaggggacaggagagagccgtcttctgacagcagtgaataaatggctgatcgctcacgaagaggcaaagatagcaggggcagtgaatggattgcagggagaaaatattaccgttgcgtaaaggaaaagtagaaaggatggtaacagtatgagtaatatgccagaattaaaaattggagttgttgcagtaagcagagattgttttccggagagtctgtctgtgacaagacgcgagaatctgatgaaagcgtacaaggaaaaatatggagatacagatatttatgaatgtccgatctgtatcgtggaaagcgaaatccatatggtacaggcattggaagacatcaaacaggcaggatgtaatgcactggttgtgtatcttggaaactttgggccggagattgcagagacactgctggcaaaacattttgacggaccaaagatgtttattgcagcagcagaagaaagtggaggtaatcttgtacagggaagaggcgacgcatactgtggtatgctcaatgcaagctacaacttaaaattgagaaatgtaaaagcatatattccagaatatccggtaggaaatgcagaagaatgcgcagatatgatcgcagagttccgtccgattgcaagagcggtgatcggtctgagcagtttaaagatcatcagctttggaccacgtccgctgaatttccttgcttgtaatgcgccgattcagcagctttacaatctgggagtagagattgaagaaaactctgagctggatctgtttgaagcatatcataaacatgatggagatgaacggattccggcggttgtagcagagatggaaacagaacttggagcaggcaataaaaaaccggaaattcttgcaaaactggcacagtatgaactgactttaaaagactgggtagaagagcacagaggatacagaaaatatgtggcaattgcaggaaaatgctggccggcattccagacacagtttggatttgttccatgttatgtaaacagccgtcttacagcacagggaatcccggtatcatgcgaagtagatatctacggtgcattgagtgaatttatcggaaccgttgtcagtgaagatgcagtgacacttctggatatcaacaatacggtgccgaatgatatgtacaaagaagatattgaaggaaaattcccatatacgcaaaaagatacattcatgggattccactgtggaaacaccgcatcttccaagttgtcattctgtgagatgaaataccagatgattatggcaagagcccttccggaagaagtgactcagggaactttggaaggggatatcattcctggagatattacattcttccgtctgcagagtacagcagactgcaaactgcgcgcttatattgcacagggtgaagtgcttccagtaccgacacgctcctttggatcgattggaattttcgcgattcctgagatgggaagattttaccgtcatgtcctgatcgaaggcaattatccacatcatggagcggttgcatttggaaaatggggcaaggcattgtttgaagtattcaaatacattggagtagatgtcagtgagattggatataatcagccaaaaggtgtcagatatccaacagaaaatccctggaacgaataggaaaagcaggaggaatcgtatgttatacataggtgtggatctcggaacatcagcagtaaaattactgctgatggatgagaacggaaccattcataagatcgtatcaagagaatatccattgtattttccgcatccaggctggtccgagcaaaatccggaagactggttcgtacagagcatggaaggaatccgggagctgacaaatgagtgcgataaaagccagattcaagggatcagttttggcggacagatgcatggactggttgttctggatgagaaagatcgggtactgcgtccggcaattctctggaatgacggaagaacgggaaaagagacggagtatttaaatcaggtgatcgggaaagagactctttccaggtatacggcgaatattgcttttgcaggctttacagcgccgaagattttatggatgaaagaacacgaaccggaactgtttgagaaggtggccaggatcatgctgccaaaagattatctggcgtacaggctgtcaggtacattttgtaccgagtattccgatgcatcgggaatgctgcttctggacgtacagaacaagtgttggtcaaaagagatgttggatatctgcggaatccgggaagaacagctgccaaagctttatgaaagttatgaggtggtcggtaacctgaagccggaaatcgcagaagaacttgggcttagtacagatgtaaaagtcattgcaggtgccggagacaatgcggcagcagcagtgggaaccggaacagtaggagacggtcagtgcaacatttcccttggaacgtccggaacgatttttatatccagcaagacatttggagtagacgagtataatgcattgcactcgtttgcacacgcagatggcaattatcatctgatgggatgcatgcttagtgcggcgtcttgtaataaatggtggatggatgaaatcttaaagacaaaagagtatgcaaaagaacaggaagtgattgtaaaactgggggagaatccagtgttttatctgccctatctgatgggagagagatcccctcacaatgatccgtctgcaagagcagcatttatcggaatgtcgatggacacgaccagagaagaaatgacacaggcagtgctggaaggagttgcgtttgcgcttcgtgattctctggaggttgcaaaaaatcttggaattcagatggaacgtacgaagatatgcggcggtggagcaaagagtccgctctggaaaaagatcattgcaaatgtgatgaatctgaaagtcgatgtgatcgaaagtgaggaaggtcccggatacggcgccgcgattctggcagcagtcggatgcggagcatttgaaaatgtggaaagagctgtggaaaaactggttcatgtggtggaaactgtggagccggacgcagagcttgtggaaaagtatgaacaacgctatcagaaatttaaaaaatattatccggcgctgaagggattgttttaagagagtaagggggctgtcgctttaacgattagtaaatcgtgaagcggcagcttccttttttctgattttcgctatatagttgctctgtttctattgaaacgatagctttttcgtaaaaaagccgtactttaatacaatccaaaactggatttgaaaaaaatttcggattctctaaatttatgcactcttcaaaggaaataaatgccttccagttttccctttttggattttgttgtgaagtttatttacattttttgccattgccagcaaaacactttcagcaagaacattcgctgtgccacgactcaaatatctgcgaaactgcatatcctgtttcagttcaccaaaagatccttctgcttggatgcttctatttattctaagaagaattccttcgtcagaaagaatccgctccaaatcttcctcccgatatttcaaaaatgtttttgctacggaaagcactttgtttcgctcttctattggtgttttacagttatttcccttgatgcactctttcttgtaaggacaatctttacattctttacattgataaatgtttttttcactgatatatccggttttagatttagagcgacggagatgtgtaaagggcagctgtttcccatttttacaaatataagagtcacttttttcatcatacttcatattttctatacggccgatgtcgtttttatattttctcttttttgatatttcataattcgatggtttgataaatgccaactgctgattttgatctagaaatacataattctcttcactttcatatccagcatctgcaatgattttttgatacttaaatgtcagatattcttctgtttcctttaagaagggaattaaggtggtagtatctgtgggctgtggtccgattgtcagccatacaatgtattcagaatcaactccatgctgtaaattaaatgctggctttaactgcccatttcccattgcatcttctttcatccgcataaaggtggcatccggatcggttttagaataactgttcctttttccacaaatatgcagtttttttgtatatccttttaaacggtccagatagtcttctaatgtttcgatactcttttgcagctgagtttttcgtttcccaataccatgtacaaatacaatgttttcttcttgttttaatgcgtacagctttttgcgtaaccgttttacgtgtttcattttaacagtatcaccgtgaacaatccgaataccataaagttgctcacattctgcaatgagatcggcgattttaatcagcaacttcgcctgatttttggttaccgtctttttccatacaaatgtatatttattggcgcaggcttcgatttttgtaccgtctataaaaatcgtttctcccgaaatttctccaagtccgtaaaggagattagacatttcagcgagaattcgtttcgcacacggagcaaaatgaatacttcggaaacgggcaaaagtggcatggtcaggaactggttttccctctaaaagatacatgaaattaatatctcgcttacagttcaattccatagagcgagaggaataatcaccattcatataggaatataaaacaatcttcaagagtgttcttggcgatactgtatttattctttcataagtagaatataagtccgttaaatccatagcctccacaaactgactcagcaaccgcacagaatcatctactggaataattgtttctaagtttaaaggaagttttagttgatatccttcctcattcaaagtataattcttgtgtaataatataggggtttgcatacttatattttacaccaacagccaggcttttcgaagcctggctgtaattttttgcatagaaaagaggctgcgcactaattatttagtgcgacagccccttttcatcgtctttaatacattttctagtaattgtttttagaatcattttttcgaaaaacaattgtttcatattggtgaacatttccatccttattaccatagagaatatcgattttgggaggtagatccaaggtgacagtgtgaactgagaaattttgtataaaaatatattcgtatccatcattgattcggcttgttacttcgattccttcagggactgtatttaaaatagagtgaatatgatgcttagctaaaattttgctataaaactcattataaaaagcttcttctgcgtcggtacagatgtagtaagcatatcccttaccatactgattgacggtcagtgcaggtgtgccttgataaaaatcacttccataattcatgagtggtgtggcaccattgagttgaactaaatcacaaagatttttgcatttataggaagtatgcagttgcaaagagttttcagggattggaataagcgaattctcttcccattcatagagtccatcaatttctttgcttctaagtccaaatacatcgagtaagctatgtggagttccctcaaggtagcatagatccgtttcatttacgattccactccagtatgtcatgattagtatcccaccattttcaacgaaagtacgcaattttgtttcgataccagatcgaaacatatataacattggtgcaaccacaagtttataagaatcaagggattgctccatgttaatgatatccacattgagtgctgcttttcgaagcgcctggtaggattttaagacactttcatggtaaaaaagtccttcatttcggggacctttcgcgtcttccattgcccatctgttctccatgtcataaataatagcagcggatgaatctactttgcttccaataacttgttttaattctatgagggatgcaccagtttcagttacttcgttgaaaacgcgtgtatcagatccaccataatgatcaatgaccgctccatggaatttttcgaaacttccacgactttgtctgatctggaaatattgtacgctgtccgaaccatgtgcaattgcttgtagagaagcagattgtaacaatcccggtttttttagtttacttactgcttgccagtttggactggaggggcaggattccattaaaagaaatggcttctgtttcatactccgcatgagatcatgctgcagtgctgtattgtatgctgtacgaatttcgtcttctttattccatgtaggatagctgtcccaagatacataatcgatgtgctttgccagattgtagtagtttaagcccttataatcatccataaaattagttgtaacgggctgagttgcaccaccatctcgcagagcatgtatctcttcgcacataaaatcaactgtctgatctgttacaaatcgtttccaatcaagattgaggccgtgtagtccgtgatctcctatggaagatggactttcaatttgatggaatgaattataggtatggctccaaaaggttgtccaccatgcccggttcaagctgtcaatatctttatatttgttttttaaccagttgcgaaaagcttcttgacataatggacagtggcattcacctctgtattcattggaaatatgccacaggattactcccggatgatttcgaaatgttttagccaacttttggttgatgattcgaacacgttctctgtaagcaggtgaggtgtagcaatgattatgccgctccccgtatagttggcgtgtacgatcttcacggacacggagaacttcggggtatgtttctgccaaccaacgcggacgggctccagatggtgtggcaagtatgacctggatgccgttgtcgtagagtttgtcaattatgtcaatcagccaggtgaaattaaaacaatcttttattggttctaaagtagaccaggagaaaacacccagtgttacagtatttatgtgtgcctttttcataagaagtaaatcctgttttaagatatcgggtctatccaaccactgttctggattataatcacccccatagataaatttatcaatatttaaatcattttggctcattcttcttatcccttctatcagtagtaataaatttgttataaaatgcagtttaaaagttttcctaaatttacgcaataataaatataaaattaggcggttacatttttgcacagcgaactggcaaaaaaatgaatttttaaaatttacaagttggtgtagaatgagggcatgagaaaaaggaaggagagtaaggatgagacccaagtatcatatttcaccggaacaaggttttttgaatgatccaaatggtctggcacaatttcgtggaaagtatcatgtgttttaccagtggctgccagatgttgttccacaggggagtaaacaatggcgacattgcatttcaaatgatctggtgcattggacggacgaagggagcgcactacagcctgatgagtggtatgaaaaaaatggttgctattcaggctcaggtattacaacagaagataagtattttctgttctatacaggtaatgtaagagatgctgaaggggggagagaaacatatcaatgtgttgctgtatctgacgatgggaagtcttttcagaaagaaggtcctgtgatctatctgcctgatggatatactgcacattttcgagatccgaaagtatggaagaaaaataacagctggtggatggttgtaggagcacagacaaaagaattgcaaggtaatgtggcattgtttgagtcgaataacttgaaaaaatgggattaccggggaaatctgctagatccgtcaatggactggggatatatgtgcgaatgtccggatatagtggatatagacggacaacaatttttaatagtcagttgtcaaaaagaaactgggtgtaaaggaattgttttcagtggaaagatggactacatcgaagcaaaatttcaattagacgatgtgggtaatttgctggatgcaggattcgatttctatgcgccacagagctttgtagatgaatcgggacggtgcattctactgggatggcttggagcaggtgagctggattatcagatgagtcagcctacagtgaaagagggttggttacattcactgacaattccgagagagttgtttgtacagaacggaaagcttcatcagcaaccggttaaggaattagaaagtatcagaagacatgagcgtgtaatcgaagcagaaggacacactttcattaatcaggaaacatggagcgcagaattactggcagagcagatatctgatcaaaaattttcttttaattttggaaatgtgctgaaaattagttttgctaataacagcatggtgattcaaagaaagcattggagcagcgaggaatatgacgaagtacgggcagagatttctgtgattaaaaatatcagggtgtttttagatcagtctactgcggaaatttttgtgaataatggagaaaaagtatttacatttaaatctttctttacggatgataaatgggttgaagttgaatccgaaaaaacaattagaattaaaatatggaggatggaggtatagaaatggcaacaaattataaagcaattgcgaaagagattatcgagattgtcggaggtgctgaaaatattatttcagcagcgcattgtgcaacaagattgcgtttgatcgtaaaggacaaagaacttattgatgataaaaaaattgaggcaattgacattgtaaagggatgtttctttacggcggggcagtatcagataattcttggaacaggtatcgtgaacaaagtatacgaagaagtaatgaaactgggtatttcaggcacttccaaaaatgaacaggcagctacggcagctcagaatggaaatgcattgcagcgattgattcgtatttttgcggatatttttgttccaattattccggtaatggtagccacaggtttgttcatgggattaagaggacttctgacacaggaggctctgcttgcattctttgggacatcttcggatgcaattccacagcaattccttcagtttactcagattctgacagatacagccttcggatttttgcctgtacttgtttgctggtcggcatttaaaaaatttggcggatctccagtacttggtattgttatcggtttgatgcttgtaagtaatattctcccaacttcctgggatgtagctcagggaaatgcagagccaatgattttctttgggttcattaaagtgaatggatatcagagttctgttcttccagcatttattattggatttctaggatccaaaatagaacagtggctgcatgatcatgtaccgaatgcattagatttgattattacaccgtttgttacagtattagcatctctttgccttggattgttccttgtaggaccgattttccatacggttgaagtaggtttggttggtgttgtaagtgcattgtttgaacttccatttgggattggaggatttatttggggagcattatgtcaggtaattgttgtaacaggagttcatcatgcattgaacctcgtggaaattgaaatgcttgcaaaaacaaattggaatccagtaaatccagtaggatcatgtggtaatgttgcacaggcaggagctgcaatggctgtagctgtaaaatctaaatcagtgaaaatgaaatcacttgcatatccgtcttctgtatctgctttgttaggaattacagaaccggccgtatttggtgtaaacttaagattggtcagtccttttgtatgcggttgcttaggaggaggaatcggaggctggttagcagcaattctgggattaaaaggaacagggatgtcaattactggtatcccgggaatgttattatatttaaatgagcagtttccattgtacatattggtaaatgtggttgcatttggtgcagcatttgcattgacttatgtttttggaatgaaaggtgatgtacaggagtaatatggacaagaatcagataaagaatctggttcggcaaatgactctcaaagaaaaagccgggcaggtaacacagttgccttcccggtattttcagattaaagggagtcaattgaccggaacggaaaacaagttaggaataacagagtgcgaaaaatggcaggcaggaagcattttagggaaaatggatgcagagtctatgcgcaatatacaggcagagaatatgaaacggagccgcctcaagattccaatgatgtttatgacagatatcattcatggatatcagacgattttcccggtaccacttgcaatgagttgttcatttaatccagaattagtggaaaagagtgcagctgtgtctgcaaaagaagggagcgctgctggatatcaggttacgttttccccgatggtagatgttgtaagagatccgcgttggggacgtgtcatggaaagttttggcgaagataaaagattaaatgcagattttggaagcgctatggttcgtggatatcaaggagaagatttaaaacatccagagagcatggctgcatgtgtcaaacactttgcggcatatggtgctgtacaaggtggaagagattataatacagcagatgtttctgaatattcactaaggaatcaatatttgccaccatttaaagcgtgtatagatgcgggaacaaaattagttatggctgcatttcaagctttgaatggtgttccggcaactgcgaacagatggcttttaaatgatatccttcgaagtgaaatggaatttcaggggacggttatatcagattggggcgccgttatggaattgattcggcatggtgtggcagaaaacgatactgatgctggagaagaagccttgcgggccggtattcagattgaaatggcaacgacaactatcatgaaaaatatagacgaatatgtaaatcttgatcccaatatagaaatattattggatagagccgttgaaagcatccttctattaaagaaagagcttggtttgttcgaggatccatatcgtggagtgaatgcactgcgtgaaaaaaatcaattacgttgtgccaagaatagacaggcagcactagaaatggcattagagtcatgtgttttattagaaaatcatgctgtgctgccgttacagaaggatacatccattgttttggcaggtccatatgcagaatcgcaagagatacttggaccatggtctgtagacggggttgttgaagatgctgttagtgtagctcagggactccgtaatagagggggatgtttaaaaagcataattccacttccttttgaaaaaatatcaaaacaagaaatggaacatattcttgaagattcaaaaaaagcagatgtaacaatccttgcactgggagaaccagaattatggtcgggagaagctggatgcagatccgagattacgcttccggaatcacaatgcagattagtaaaagaactatttgaaaacaaaattaagacggttgtattactattcaatggacgtccattagatttgcggtcaattgtgccctattcagacgcaattattgaaatgtggtttccaggaacagagggagggaatgcggcagcagatctgctgtttggaaaagtgaatccatcgggacatttgacaatgagttttccatatggaagtgggcagattccggtatattataatatgggaaatactgggcgtccgaaggaactgctggagcaggagccaagatataaatctcagtatctgaatattccaaatgaacccttgtatcaatttggatatgggcttagttacacgaactttgttgtagtatttgatggagaaatacagaaattagatgatggagcatattccgtgccgattaaagtgacaaacacaggaaatagggcaggaaaagcagtaatccaggtatacattcacaaaatgaaatccaaagtggcaagaccggtcaaagaattggctgcatatcaaaaggtgatgatccgtgcaggagaaagcgtgagtataaatattcctttagaaaagaaaagctgggattattggattccaaatattgggtggacaaaagatgctggacactataaaatcatggtaggaacggacagtcagtatgtggaggaatgtgatctgattgtcgagtagacatgatggagaacaaaatgtacaacagaacgattaaaattataaggacgctcgtaggacatgaaaaaatgtcttcggcagaactgatggataaattgaaaatcagtcaaagaacactaagagcggaaataaaagaggcaaataagtttcttcaacgagaaaatgttttcattcattcatccagcacaggaggatattatgtgaagcaagaagatcgtgctcaagttcagaaagttctggatgcgatcattgaagaaagcaaaagagtgatctttccagaaacaccggatgaaagatttttgtttggaatttcctggcttttctttttaaacgaaccggtatctattcaaaaattgtcagaaaagctttatgtatcaaaaacggcaatgctgcagacaaagaaacagattcaagatacgatcaggtggtatcatggactttttctagagtctgggaaaaaaggaatgtggattagtggaaatgaaagaattaagagacatgccctggcagaaattttaaattatcggacttatggctcaatcctaatggagcgtgtgattacttttttgttcggcagcgagaagtatgaggattatattttgctgtatcatcaattgccccaaattctctcagaacacgggtatcgattgattgataaagcaatagaaggatttgcccttgatatttttatcagtttgatgagaactgataaacagtttgttcttgaagaacagatggatgatatcagctgtgagaatgcatgtgtcgaatcgatatgcgcggttctttgcgaaatgggatatcatgtagggggtcgggatcaattgtttcttgaagaatgtctcagtgcaaaaagagtgctatatgtattaggaaaagattatcatataccagaggaatatcttttaattacagatggatttttagacagagttgatagaagatttcacacggattatcagaataatccagaactgctatcaagattgtctgtacatatcatgaagatgataaagcgtattcaacaaggatattttgagactaatccagtgttggaagatattttgaattcttatgaaagggatgttgaagcagcagatgaattgaataaaatactggaagaaaaataccatataaaggcaaatattcatgaattgtgttacattgcaatttacctgcgtgcatattatgaaagacgattgaaagcagttgttttgtgtgatatcggagaaagtattgcagacaatatgatgcgtcgtattaatgattattgcggagataggattgagattttgaataaaatgtcgctggcagagtacagattaaatccactcccagttgatttattaatttctactgctcgtgtttataatgtaaatttatcgaaaaaaacaaaagtaatatatgtggattatctaatgaatgaggaaaacttaaaggacattcaagagtatttgctacaagatatgcagaaggagtaaagcagatgattcgaatgattgcaagtgatctggatggaacactattgcgaaaggattggtctatctcagaatatacgattaaaattataaaagaagcacaggccagcggaatacgttgggtgactgtaacaggaagatcagatagaggtgcccgaccaattatggagaattacggtcttagctgcgattatatattaatgaacggggctgaatttcgagatacaaatggaaatttgattaagtctgaaaatatagatacggatttagcaaggtttgtatgtgaaaagcttcatcgtgaaaatcttggatttgaaatcaatacagatcggggagattatacaactacgatggaattagcagagtattcggattatttggaggatggatacgagaaattatttgaagaaaaacataatattcgtaaaatattggttttctgtgatgatattcctaaaatcagaagaataaagcaacaaatttatgacgctagtggcttgtctgttctttcctcttttgaaaataatatggaagtgacccctcaaaaagcaaaaaaaggaattatgttgaagcaagcgatgaagcattttggatttttaccagaagaagtagtcgtgtttggagatggtgaaaatgatatatctatgtttcaggaatttccatgttcttatgcaatgataaatggggttgatgctttaaaagaacttgcgtatcgagtaacagaatattcaaatgatgaagacggagttgcaaaaacggtagaaaaacttctgaaagtatagtgttgaatttgattgggaggaaagcataaatgaaaaagacaatggcagtagttacaattgtttttcttggcattgcaggaatgacaggatgtgcatcctcagagaggctgctgatccagaaaaactgggaaatgaaacttccagatggcggtacggaagattaccatgcagatacaggggcatcttttcatggagatggggagaaatatacagtatttcagtatcgaagtacagaagatgtcagtacatttttggattggaagaaggatgaagataccgctacacggtatgaagattcctatgcagagtttgcagaaaagtgtctggataccattgatgttccaagtgaggagcgaccggattataaggagtgtgtgtactggtatcgtgaaagagaaacagatttttcagagctgctcctggcatatgatgatggaaaggagcagctgtatgtaatagaaagcgtgcgataatggatgtagtctcaagaaagatagtactgaagcaccatctctgccattcgcagcatttttttagatagaggataggaaccttcatgaaggcaccagtcgtagatggtacctcttgttgtacttaaaatatcttctgtgatcacaaaagcatttcccgttaatcttccagaaacgatttctgattcaatggtgttcttgattgtttgataaaagaaacgatccggatttaaaatatatttttcggaacaggacagctgatttttgaaatattgtaaagaggcagatgcccccattctctccatggaagctgcctgttcggatattaaaaaacgaatggcgtcaaaaccgtctgaaggatgaccggacatccatgccagttctacttcctggtcaaaaagatggtagccttcttccagaatattctctttactcttatagtgatgataaaaggctccgacagagacttgtgcctcctggcagatatcgcttaccgttacattttcataagacttttgagcaaaaagcgagacagcacaccggaaaatattttgtttggtagcaagtgcctgtttttggcggtttgtcattggtttcataatcaatcacctcgtgaatttcagaataacatgagaagcaggattattcaacagtatttcgttggcatatttcacaaaatatcattcggcgaattgtattctgtgtcaatggaattttaaggaaaaaggtgctatgctgttgtgtagaaagtaaatggaaaatatgtaaaagttcttgcaggaacaggaaggagttgcctatgtcaacaaagtacacgcacttattttcaccaatcaaagtaggtggaacggaacttcccaatcgtattgcgatgatgccgatgggagtattctcaccacgtttacttgatccgaagaccggtgcttacacaaaagatggagcggactactatattgagagagcaaagggcggaaccggactgatcgtgacaggtgttgttccgattattccgatgccgggaaaaaatcctgttaattttccagatgaatacgtagaaaaaatgcgttatctgacagaaggagttcacaaatatggctctaagatttttatacagtttacagccatgactggtcgtgcagctcatattaccaatgaaatagaatggaagatgctgccggcgccggctccgattcagaacgtatgggatccgaccattcaaaacagaggaattacaaaagaagagattcaaaaatatattgaaaattttgcacaggcagcatacctggtaaaacaggcaggtggagatggtgtagaaattcacgcagttcacgaaggatatcttctggatcagtttgcaatcagcttctataataagcggacggatgaatatggcggaagtctggagaatcgtctgcgctttgcaaaagaaattgtagaagcgatcaaagcaaaatgtggaaaagaatttccggtatctgttcgttacagtgtgagaagctatgtgaaagacttcaacagaggagctcttccatgggaagagtttgaagaaaaaggacgtgatctggcagaaggaatccaggtagcgaagatgttggaaagctttggatatgacatgctggactgcgacaatggaagctatgactcttggttctggccgcatccgccaatgtatatgccaaaggcatgtaatctgaaagatgtacaggaagtgaaaaaagcagtcaatattccggttgtatgtgccggtcgttttgatgatccggagctggcagaacaggcaatcgaagaaggcaaaatcgatattatgggaatgggacgtcccttgcttgcagatccagagcttggacataagttctatgaaggtagactggaagatgtgcgcccgtgtatttcttgccatcagggctgtcttggacgtattttccagggaaaagatatcagttgtgcagtcaatccggcatgtggaagagaaaaaagttatgccttgacagaagcagagaagaagaaaaaggtgctggtcattggcggaggtcttggaggaatggaagctgcaagagtttgtgcgctgcgtggacatgaggtagacttgtatgaaaagacggatcatctgggcggtgtatttgtggcagcagcgactcctgattttaaagaagacgacagacatcttcttgcatggtacaaaaaacagatgaaagatcttccgattcaggtacatatgaacactgaagttacggaggatatgacaaaaggatatgatgaaatctttgttgcaacaggtgcaaaggaacgaaaattagagattccgggctttgattcaccgcatgtaacgtatgcatttgaaacactcagagatggaagtattcagatcgatggcgaaaatgttctgatcattggcggcggtctgacaggatgtgaaattgcatatatgtttgcaagagaaggaaagaaagttactatcgtagaaatgacagaaacgattttaaatgcgttcgggctttcagcggcaaactacaatatgctgatggaaattttggattattataaagtgaaggtgattaaaaacgcagttgtggaagaattccgggatggaaaagcaattgtggcagagactgtgaagaattatccgaacgttgccaaccgtgcaaaattaatgtttgcacttgggccacagggaatgaaagtgaagcatgaaattcctgcagatcatattgtagtatcagtgggatatcttccggatgacagattgtacgagcagatcaagggagatcatgtttatctgatcggagatgcaaaacggccgaccaatgtgatggatgcaatttgggcagcatatgagattgcaaaagatatttaataaaagatgtgaggcgattttggcacaggattttcctgtgccaaaattatttgtggaaaaattccgggtcctgctttataataaccatatctatctgccgagagaaataatacaaaggagaagcacaagtgagttttttgaaagaagtcatccagttgtatgtggaaagaaaagactggtttttagagttgatcgcagcgcatattggattgtcactggtagcgattctgtgtgcgggcagcattgggctgctgcttggtatctggatttcagagcatgaaaaagcagcggggccggttctgggagttgccaatgtattttataccataccttcgatttcgcttttgggaatgctgattccgtttttgggaatcggaaatacaacggcggttgcggcgttgacgatttacgggatcatgcctatggtgagaaatacctatgcaggaatcaaaggggtcagtgaagaaatcattctggcagcagaggcgatgggaagtaccaggatgcagatcatgtggaagatcaaactgccgttggcaatgggcgtgatcatagcaggtgtcagaaatatggtcgtaatgacaatttctgttgcggccatcgcatcgtttatcggagccggtggtctgggggttgcgatttacagaggaattacgatttatgatacagcaatgacgttttgcggcagttttctgatcgcattgatcgcgttgatctgtgattttttactgggtatgttagaaaaacgaatgaagaaaggaaacagtatatgaaagtaaaaaagatagcagcagttttattggcaggtgccatggtagttgggattgcgggatgcgcaaaagagaaagaagaaccgattaaaattgcgacaaaaccgatgacagaacagtatatcttaggagagatgctgacacagctgatcgaggaacagacagggtatgaagtggagcttaccaagggaatcggcggtggtacaagcaatatccagccggcgatggaaaagggagagtttgatctgtatccggagtatacctccagtgggtggatcatggtacttggacatgaagcgggagaagtcagtgatgaagaaatgttaagcaagcttcaggaagagtatgaaaaagagtttgatatgacatggattggtctgtacggatttaacaatacctatgcagtggtggcaacaaaggaagctgcggatcagtatcagttggagacttgttccgatcttgcaaaagtgtcagatcaactggtattcggcggtaatccggattatattgaacgcgcagacggattcccgggactttccaaagcgtatggtttgaattttaaagccgtaaaggatatcgatattggattaaaatacgaagccctgaaaaagggagatattgacgtgacaaacgggtatactacagatgcacagatcagcagggacgatgtaaaggtattaaaagatgataagaattatcagaccaactactattgttctacagtggtcagaaaagatgctttggaaaaatatccaaaactggaagaaactcttgagctgatggatggaattctgacagatgaaaaaatggcagaattgaattatcaggtagaagaagagggaaaagatgaagcagaagtagcaaaagagtttctgcttgcagaaggactgttaaagaaatagagtcaagacagaggataagaatagaaatgattcgatttgaacatgtaaacaaaagttttggaaacgaacaggtgcttatagattttaatctggaaataccggaaggggagtttttgacggtgatcggtcgttccggatgtggaaagacaaccatgcttcgtatgatcaacggccttcatacgccagattccggaagggtactggtgcaagaaaagaatgtggcagagacagatttgatcgctcttcgcagaagcatcggatatgtgatccagaacaaaggattgttcccgcatatgactgtggcagagaatattacatatgttccggtgatcagcggaaagaaagacaagctcgaaaacagaagacttgcggtgcgtctgctaaagacagtagggcttccggaagagatggcagatcgctatccgtcggagctttccggaggacagcagcagagagtgggcattgcaagagcacttgcggcagacgcaaagattttattaatggatgagccctttggagctttggatgaaatcacaaaacgggcaatgcaaaatgaaatgctgtctttgcaaaagcagcttcatatgacaatcgtatttattacacacgatattcgagaagcgatgaaattgggagatcgcgtgcttgtaatggaaaaggggcggatcgcacagcttggtacaccccgggaaatacaggagcatccggccgatgattttgtaagagaactgacacagtggtgataaaaaattgtggttaagaaaagtatgaataaatagtaaaaagggaacgtgcgatatttcgccgttcccttttcaatggacctggcgggagtcgaacccgcgtccaaaagcctatcccatgtacttctactatcatagtcagttttttgtgattcccccggctatacgaaaacggacatccttacagcttcggtagcttcatcatacgcctgacagctcaaagctttgctgccatcgtttctcacaaaagtcgatgccagattctcaaggtgtgagtgccctgaggctgacaagcagcaactaggctgctaacgcgtaattttcgtctgcgtttaattttaagtttgcgatttgacgcatctgcctgcggatagcttctccatcttcaagacccctgtcgaaaccagtacaagccctgaatcaaacagtttttcactgttctaattataatataggagaatctgataaaaagtcaaggggaaacttggaacagatttggatttttcgtttattttctggaaaattgtgataagatatagaataggtttttaaaaaatcaggctggggagttttgattcaagtagtggaaaggggagagtatatgccgacaacatatacacattatcgatttggaaaagaggttctggaggcacttccaagaagaatccggacagcaatagagaaaaatcgggaaatctttgatatcggtctgcatggaccggatattttattttattatcatgccctgattcccaatgcagtgagtggtcagggatatgggatgcacagaaaacaggcagattcattttttgaaaatgcaaaacaggtgatccgggatgcagaagataaaaccaaaagcagggcatatatttacggatttatttgccattttgtattggacagtgtgtgtcatccgtatattgaaaagatgatgcagaaaagtgggatcagccattctgaaatagagatggagtttgatcggtatttgttgtcagaagacggattcgatccagtggtctacaaattgacacagcatattcatcctacggagaaacatgcagaaatcatggcgtcattttttgaaaatgttacgattcgtcaggcaaaacaagctcttttcggaatggatttttgtcataaagcgttgtatgctcctggaaaaatgaagagaagtctggtgtttggtgcaatgaaggctgtccggcagtatgaaagatttcacgggttggtgatgagtctgcaagcaaatccagaatgcagagaatactgtctgttattgaagaagctttatgaaagcgctattgctgtggcagtggatctgattatgaaatatcagaactacctgcttggaacagcggaacttccagaacgattttgctgtacgttcggagctggtgacaagtgggaggaactggtgttgtgagtaagaaagcatgggtatttggcgttctgacagggttgttgtttttgcatatccccatgacagctaaggcacagattacatcttcagatgcattccggaatttaaaatgggagctggtcaaagaagatgtgatcgagacggagcatggagtcatccagtcggtttgtgcaacggaagattatattatctgtatggaaaatgttctggacggaagcgggcagccggatattgtaaaagcatattaccgcaatgatcgggatgcacaggggaatccggtggagccttattctcttgcgatgcaggttcaggagacggactatgagcatgcgaacgggatggcgtataatccaaatacgaatgagatcgcagtcagtctttataccagttatcaaatagaaaacagaggctgcctttttattatggacgcagatacactgaaattcaaacgtaaggtgcaggtgtcagattcttataatattctgggaatcggatacgattcgacgaatgaccgctatgtgatccagacgaataaggcaggagactatcagtttaaactcttgaattcagagtttcaggtaacggaagacctgggggatctgggtggatacgaaggagatggaaattaccaggatctgtgtgtggcggaggattatattttgaattttccgttgacgttgttttcggggaatggtgattttctcaatgtatattctctttcgcagaaaaaatgcctgtattatgaaaaactggattttcagtttgaagatgcagtgattcgggatgaaccagagtcaatctgtgaactggagccaggcgtttttctggcagctgtgaatgttgccttgtccgatggaacaagtaaagtcagattgtataaaacagaggtgccatatcaatacgaaattgcagtgaagatacaaatgggagaggacaagccgtccgtgtcgaagaaaacagtaatgcgtggggatacgtttgaggcagcctatccggaaaaagaaggatacaagattgcatctgtcaaagtagacaaaaaggaagtagatctggaaacatatcaaagcagatatcctttgaaatcgatacaaggtgcacatacgatttcaatcgtttatcaggaaaaactggctttgtggaaaatcatagtgccgatttgcataggagtcgtctttttcatggccggattttgcttctatttgaaagtcctgcagatacgaaggatccgcaagcgtaaactggaggctgaaaagcgccgcagagcacggatcaaatggcagaacgatgaatggaatatcgatgaaatttattgaattttcagaaacagttcacaaaaaaagaactgtttctttttttgccccatgatataatgaaacaggagggatagcgtatggatgcatttgtgaaattggaaaatattaccaaggtttatcatatgggagaagttgaaatccgggcggtagatgggattgatttttccatacagaaaggcgaatttgtcgtaatcgtaggaccaagcggggccggaaaaacgaccgttttaaatattttgggcggaatggatactgcaaccagtgggaagatcacggtagatggacaggacattacgaagtacagcgaacggaagctgacgggatatcgcagggatgatattgggtttgtatttcagttctataatctgatcccgaatctgactgcacttgagaacgtagagatggcacttcagatctgtaagaatccgctggatgccagagccgtattaaaagaagttggtctggaagaccggatggataatttcccggcacagctttccggaggagagcagcagagagtttcgattgcgagagcactggcgaaaaatcccaaattgcttttgtgcgatgagccgacaggcgcactggattataatacaggcaaggcgatcctgaagattttacaggatatgtgcagagaaaagggaatgacggtgatcgtgatcacacataattcggcgctggctccgatggcagaccggctgatcaagatcaagaacggaaaagtatccagtatgaaagtcaatgagagtccggtttcgattgatgagattgaatggtagggtgataagatgagaaagaaagcactgagaaaagatttttatatggaaatccgaaaaagcttcggaagatttctctccatcttttttattgttgccatcggaactgcatttttttcaggaattcgtgcagcggagccggatatgcggctgtcaggggatgcatattttgatcagcagagactgatggatctgcaggtagtcagtacgatgggactgactgaggaagatctgcaggaagtacgtaagatacagggagtagaaacggcacagccggtctattctatggatgccttgtgtgatgtggacgggagtcagaaggtagtccatattttttcagatccgggcagcataaatacattgacgttagaagaaggacggatgccgcaaacaaaggcagaatgtgtggcggatgcagattttctcacatccagtggatatcggatcggagatacgatcacgtttttgacggatacaggttcggaagtaaaagaagaactgacgcagagcagttttcggatcgtgggaagtgtgagcagtcctctttatatttctttttccaggggaagcagtatgatcggaaatggaagtgtcagtgggtttatttcggtacttccggagagttttcagatggatgcttatacggagattgcaatccgtgtaaaaggagcagaagcaaagacggcctttttggatgaatatcaggatctggtagatgagacaaaagtgcagatcgaagagattcggacaacgagggaggacatccggagagaggaattgatacagcagatggatcaaaagcaggcagagctgctggcacaggttccgccggaggcaatggaaatagcagttccgcagatcgagcagcagattggtcaacagaaggagaagctaaagcaaggaaaatggtatgtcaatgacagggaagatatgacagaataccgtggatacggggagaatgcagatcggatgcgtgcgatcgggagcgtattcccggtactgtttttccttgttgcggcattgatcagtctgacgtctatgacacgaatggtggaagagcagaggacacagatcggaacactcaaagcattgggatattccagacattcgattgccggaaagtatctgggatatgcgttttgggcaaccgtgggaggctgtgtgtttggcgtccttctgggagagaagctgctgccttatattattgtgacagcgtatgggattatgtatccgcatatgcatacagttgaaattccatataacctttattatggagtttctgcatcattgacagcgcttgtatgtacaatgggagcaacattgttttcctgctacaaggaattgagggaacaggcagcgcaattgatgcgtccgcccgctcccaggaaaggaaagcgggtatttctggagaagattccgtcgttatggagacagtttaattttatatggaaggcaacgatccgcaatctgctgcgttataaaaagcggttttttatgaccgtattcggaatcggaggatgcatgtcccttctgttggtagggtttggtctgcgtgattctatctttgacattgcgcagctgcagtatcatgaccttcagctttacgatgcgaatatcatattaaataccagtgccagtgaacaggcccggaataacgtagaacaagatctgtattgggatgaccaggtcgatcagacagcggtcggatatcttggtcaggtgaaaatcaggcacgaaagagaggaacaggaagtatacttaaatgtcccggaggatctgcatgattttgaagaactggcagtgtttcgggatcgcaggtcacatacacggtatgacctgaatgcagaaggggtgattctgacagagaagatggcaaagctcctggacgtggaacagggagatacgatcaccatctgtcaggaaggaaaagaagatgtccaggtaaagattggaaagatctgtgagaactatatcgggcattatctgtatatgacaccggaggtctatcagtccctgtatggagaggatctgcagtacaactgtgtatatttccggatgaaggaaggatatgaggatcagttggagattttgggggagaatgttttaaaaggagaaggcgcactgaatatcagctatacatactctatcgaggagcagctggatgatatgcttggaagtctggatatcgttatggcagtgcttgtgatttcagcaggaatgctggcatttgttgttttatacaacctgaacagtatcaacatcaccgagagaagaagagagcttgcaaccttaaaggtgcttggattttatgacaaggaagtgtctgcctatgtataccgcgagaatatgatactgactgtgatcggcggtattaccggcatgattctgggaaatatcctgcatcggtttgtgatcgtgacggtagaagtagattctacgatgtttggacgaaatatagaatcagccagctatggatatagtttcctgatcacacttgctttttcggtactggtgaatctggtgatgtacttcaagctcagaaagatcgatatggtggagtcattgaagagtgtagaataagaaaggatttcacattacggacataaatatctgctatgatgaagcaaagaatggcaggacgaggagtgagaaaagtatggacaaaacaaaaattttagtagtagatgatgaaagcagaatgagaaaactggtaaaagactttcttgtgagacagggatatacggtattagaagcaggagatggtgtggaagcaatggactgtttctatgaagataaggagattgcgctggttattctggatgtgatgatgcccaggatggatggatggcaggtttgcagagaaatccgcatgcattcaaaagtgcccatcattatgctgacagcaagatcagaagaacgggatgagctgcagggatttgaactgggagtcgatgaatatatttccaagccgttcagtcctaaaattctcgtggcaagagtagaagcgattctcagaagaacgcagggaagcgggaatgcagacgaaatttcagcgggcggtatcgtggtggataaggcggcacatacagttgccagtgatggtatgccggtggatttgagttttaaggaatttgagctgttgacctattttatggagaatcagggaattgctctttccagagagaaaattttgaataatgtatggaattacgattatttcggagatgcccgaaccattgatacgcacgtaaagaaactcagaagtaaattaggagataagggtgaatatatcaaaacaatctggggaatgggctataagtttgaggtagaagaatgaaacattcaatcaaaagacagatgacagtcgtattcagcggcctgatcattttcattctggtgatgatgttccttgtatattcaaaatgtctggagacttattacatcatgcataaagaagcggatcttctggaagtacacaagacggtagggactgcactggcacagggaaatacagaggacgagcgggcatggaaagtgatggaacgcacgaacatttcgatgcttgtcttacaggataatcaagtgattttttccccgaggggagataaggaacagctggtcagtcagctgcgcggttatgtattcaaccaaaaccaggatgatggagagcttttgaaaagtacggacaattatgaagtgcggaagatcaaagatccgatagcgggcattgattatctggaaatgtggggaacttattctacaggagccatttttattttgagaagtccgctggacagtatttgggagagcacagcacttgcgaataagctgttggtttatgtgggaattgcggcgctggttctgggaggcattctggtctctttatttgcaagaaagattacggaaccgatcacagagcttgcgtttctttcacgccggatgtcagaacttgattttgatgcaagatataccggaggcggagaagacgagattggaatactgggaaataatttcaatattatgtcagagcgtctggagaagacaatttccgaattgaagcgtgctaataatgagttattgaaggacatcgaacaaaaagaaaaaatcgaggatatgcgaaatgaatttttgggaaatgtttctcacgaattaaaaacgccgatcgcattgatccagggatatgcagaagggctgaaagaaggcgtcaatgatgatccggaaagccgggaattttactgtgatgtgatcatggacgaagcatccaagatgaatcttatggtaaagaatcttctgactttgaatcagttggaatttggcaatgatgaagtgacgtttgagcggtttgatgtatccaaattgattcagggtgtcatccaaagctgtgagattctgatccaacaggcaaatgcaaaggtcgattttatcggagacagcccggtctatgtgtgggcagatgagtttaaaacagaacaggtgatccgcaattaccttacgaatgccattcatcatgtagacaatgaacgcaggatagaagtgcgtattttctcccaaaatgatattgtaagagtgtctgtgttcaacagcggacatccaatcccgcaggaagatcttgcaaaattgtgggacaagttttataaggtagataaagcacacacaagggaatacggaggaaatggaatcggactttcgattgttaaggcaatcatggaatctttccaccagaaatatggggtcagaaattttgacaatggggtggaattctggtttgaactggacgggaaatcagctttacatgaacagaaaaatgcggtaaaataatctgcaaatgcaggcatacaatgtgccaactggaaacaggaggtattttgtatgccttttttagaacaagaccgttcagatgaaaggagtacacaaatgacagcaattattgattatggagcaggaaacatcaaaagtgtggaaaaagcgctgctttctctcgggcaggaagttgtgatcacagatgataaagagacgattctgaatgcggacaggatcatccttccaggagtcggagcatttggtgatgctatggcacagcttgagaagactggtttggatgaagtgatccgggaagcagcagagaagaacattccgtttcttggaatctgtcttgggcttcagctgttgtttgaaaaaagcgaggaggctcccggagtaaaggggcttggaattttaaaaggtgaagtgaagaagataccggcagaacaaggactgaaaattccacatatggggtggaattccctgcattttgcacatgacggaaagctgtttcatggaattgaagaaggttcctatgtgtattttgtacactcctattatctgaaagcagaggaagaatttattgtgaaagcatccacagaatacggggtttcgatccatgcctctgtggagaaagacaatgtatttgcctgtcagttccatccggaaaaaagcagtgagacagggttgaagattttgaaaaattttgtagagctgtaagggggaagatgtgatgtttacaaagagaattattccatgtctggatgtaaataacggacgtgttgtaaaaggtgtgaactttgtagatttaaaggatgcaggagatccggtggagattgcaaaggcatatgacgctgcaggtgcggatgaacttgtatttttggatattacggcatcttctgacggacgaggaaccgtagtggatatggtgcgggaagtagccaggtgtgtgttcattccgtttacagtaggtggtggaatccgcaccgtagaagatttcaaagtactgcttcgcgaaggagcggataagatttccatcaattcttccgcgattgccaatccacagctgatccgggatgccgcagacaaattcggcagtcagtgcgtagttgtagcaattgatgccagaaagagagaagacggaagcggctggaatatttataaaaatggggggcgtgtggatgttggactggatgcggtcgaatgggccaaaactgtggaacgtcttggtgcaggagagatccttttgaccagtatggattgtgatgggacaaaggcagggtatgatctggaattaaccagagctgttgcacagaatgtatccattccggtgatcgcatccggaggcgcaggcacgatggagcatttcaaagaggcgctgacagagggaggcgcagatgcagcattggcagcctcattgtttcattataaggagctggaaatccggcaggtcaaggaatatttgagaaatcaggggatttctgttagattgtagaggacgaaagagaggaagtgaacagcatgtccggaatcaatggagactggtatgaagcattaaaaggggaattcaaaaagccctactacaaaacattatttaatacagtaaatgaggagtatcggacaaaacagattttccctccggcaaatgatattttcaatgcatttcatctgacgccgctgaaagatgtgaaggtcgtgatcctgggacaggatccataccataatgtcaatcaggcgcatggactttgtttttccgtacaaaagggagtgcagatcccgccctctctggtgaatatttataaagaactgcaggatgatcttggctgtacaatcccgaatcacgggtgcctgaccaaatgggccgggcagggcgtactgatgctcaataccgtgttgactgtacgggcacatcaggccaattcccatcgtggaattggttgggaagaatttacagatgcagcgattatggcggtcaatgcacaggatcgtccgattgtttttatcttatggggagcaccggcacagcggaaaaagaggatgctgaataatccgaagcatctgatccttgaggcaccgcacccaagtcccctgtctgcatacagaggatttttcggcagcaggccatttagccagaccaatcgttttctggaagagcatggcgtggcaccgattgactggcagattgaatagtgtatagaaagaacgaagtcattttctcaatattggaaaatgacttcgttttgtatattttgcacaattatattgaaaaacaaacgggataaaggtacaattaacataataaaattagagttttatttgccacagaaaaagcgtaactacagatcagaggatgaaaaccagatggactgatcagaaagttgaggaagcgtatgataggaaaagtagtgaggatacaaaagaattcaaaggggatttttggatttataaagacagaggccggaaagtattattatgatacttcaagtttgagcagaggtacttttctgaaaatgggggatcgggtagagtttgagagcattccatggaagggtggaaaacccaaagcgattcgtgttcgggtggtagaacaatcagtactggaagcggaaattcagaagacaaaccacgatgaaacccaccccgcagagtttgggcatgtatatgcggtccaaaagaaaattccggaagagatgataatccagattcgaggagcactgatggctgaaatcgaaaaatcgggatttattctggcatccaggcttccttctgtcttgcgcagcttcggaatcagccaatacagagagtatgcagtgaatctggactcttttatagagcaatatataccagatacgtttgtagccaaacatggaattctcattaaacaaaagaaatacccgaaaatttttatattgaaagaagaggaaagtaagtttggacaaatcgctgaaacggagtcagattctgtgaagacgacagagccagcatggaatccggaagagtctgcagacgctgcacaggacacgaaagaacagggaaaggcggagcagagtacgattttacggaaagtacaggaaatgttggatatgcaggagtatgaggcgattctccggttagaagaagtcggcgactggggtccgcaggatttcggagatgacggtattgaattgctgctcaaggcagttgcaggatttctgggagagaatacggatcatattcagtttaatgattatcacaggttattgatcaatacagaaacagtggcagatttaaaaccatacaaagagaatgagagaatgttggaacagggagcggaaactgcgattattcctatgacagcagaggaatacagaagaattttcgcagacatccacaatggcaagaaaaacagcaatgctgtctggaatggtatcattgagcgcttttggacggccaaaagtgagctggcgttttatttgacatgtttatggctggtggttgtcagacaagagaagtgtatcgatctgtatatagaggaagcggcgaaaatttccagaatcgataagctgcctatgttgttaaagatcaatcaagtgtttggagaacatggtgtaagtgtgcgtctacagagaaaaatcatgggacgctgttttgatctgaatgatactgcagcattggcagagtcctgcgcatattttggagagactgcgatcccggaaacggaaaaactggcggagtgtttaaaggaaaagtcaccaatggatgacgaacttctgatgaagtggttccattgcgaaatcggaccgcagatatcagagaaggccgtcaattattattggtggaagtattcttcccagggaattgatgcaagcttgtttaaagtacttgccttggtatattgggaatatccggaatattattacacggaaattatatataatccagcatgtccgctatttggaaaaaaagaaaaagagacacttttacgcaatcattttgtaaggctttgtcatgaggcaagaacgtatacaaaagcctatccatgggtgaattatctctatctgacgcttttttccgaagaaaaagaggaggatgcagagtgtgcctgggaagatctgcattcctggatgaaggcagaagtggcggctcttttttccgaagatgtacgcactgcaggaaacatttcgctctttcgactggatgaaaatgtacggaacgaattggaagagcagtactgcgaaacatatgtggcgccaaacgtgcagagattttcggaagaggaattggatgagtttgtagaattgtgtgaaaaacaaaagctttcattcattacgcagtggattgttgaacacagcaataataccgtttctgtgtcagatgaagaaacacatgtcagagcatttgtctctgcacgaaaatatgaggaagcgatcagatatcttcaaaagtcggagattggacaggaaaagaaaaacggtctcatccgggagatattgtgtgaaaattttaaagcgtataatgtagatgaaaaggcgtttgcgatattagaacaggggatttcagcagacgaggcagaaaatgccttgtgtgagggtttgaaatttacagatcatgatgagatcgttgcattggcggcagtatatatttataaaaaagaatgggtaaaagcggtgtatttgatggtgccaatccgggtattctatctggacgcacacaggaaatttatagaagatgcgcgtattcttctccatcaaaaatataatatcgatattataatgtgctggtccaatcattatgaagtagtaaaacgggcccttcgcatatatgatattcaggaatttgatgcatttatggaatggaccaggattataaaaatcccgaaaaattccagcaaatatacgctgcgtccaagaacatttgataattttattcaaagtatgatttccggagaggagaaagacggttgttggaatcaactggtacgaatggctctgcggacggacaataatgacagacaggatgatctgcgtttttgtattatagccagctacatgggaagatatgggcttcatgcgatagaatatgtcattgaatcaatggcacataatacaaatgcaaccaaggggtatgtcgattattatgtcagcttgtggaagggacttctgaatggaaaatataatgtgaattttcttcggttatgtcaaagtctgatcggtgtggcaccgattacattttggaatgtattttatgatacggcagctgtcaagaatcatatatttgcttcggatcatttcgactgggaagcctggagaaacgatcttcagaattatcaggaattttattccaatatcttaaattgttatgtggaaaccagagaagttgtatatttgaagattgccgtagtcctgttaaaagattgtgggacacagctgatccctgagttggaaaagtatatttcattttgcaatagtacgcgcagcaaatcgtttcttttatcagctcttgcaacacttttgcaggaaggcagatatcaggaagaaatcagaagactgatttcttcggaatattggaattgttctccttcagagcaggaagtgcttcgtttattggaagtttgctgcatggatcaggtggatatagagacagaatatggaacacttaccgagaacgaatggaattattttaagaaagactgcctgcaatgtataaaatcttatcctgaactggaaatagaatatgccctccggctgacggacaggaatgcttcctacaggctgaaactgttgaaagcaatgctcaggatccagtactcacctgtgatgagaggagaagcagaaaacgctccaaagatcacggaaaactggagagaagatccgcaggtgaccgattatctgaagtttgtggaactcctgtatcaaaagcaggcacagaacaaagagaatctatataacgatgcaatgtttatcaaaaaccgatatatcagactttttgtttccaaattattgctggaagacaaatttgaggaatacagtgatgatcaggtgattgctttgatgaatgaaaataagcattttaccgcaatatattctgaatatgaacaacctaaaaaatatatttatgaattgcttgagcaaagggatacttcagactatttaaaagcggtatttctgattggattcctgtcgaatcagtgggggcagtttatagattgtgtagatcagtatggtttgcatgcattggaaatcatctgtaaaatagaggctctgacgaattatcgggattttcatatacagatacttcaaagatatgtagaagaggcagacagtgaatttgacgatgaagaaatccttagttttgaaatatgttcgcctaaagtatacactctgctttgtcagttaaaacaaaagaaaaagcagtctgagatggagtaccagaatgtgaagaaactgattgccggaatctgcagattccattatccgggcaaggcgcagcgcagctatacctatatgaagtggggattacggacatgttctgaggaactgaagaaaaattgggacctgtatatgctggcattggaggcaaccagttataagaaaacgatgatcgttaatttgctggatgagatcaaaaaagggaaattggatgtaaacgagcttaaactttggatgccgatctttcgaacatttggagatctccctgtttattactatattctggcagccagatatgctttggatcgaaagcgagaagaagcgaaagaagcattttcttttattggcgagcgggatgagctgccaaaagaatggagcgaagatattaaaaatctgaagcggtatttgtctggaaaagagaagtatttttccatgacgagcagtacattacaagcgttgacgatcgaaaaagaagcagaagcagtatcttttatccagattgcttttagcaaggaggaaatcaaaatatccactgctgtaaaagcatacagaactattttgagcaaagagacagaagatattgtgaagctcaatgcgtacaaacagttgtttagtgttgtgaaaaaaccagacgatctgcttgatatctatccacaggcagaaggaaaagaaacacggggaaaggcaaacaggcttacttataatgagttgatgatcgaatatggcagtcttttgatctgtctggaaacggaattatcagctgcctggaaaatgcagattttactggaaatattcagtgtgtttgaatttttaaatgacatgaacaagtgcaaaaataatatattagagagactgggggcggcagagcaaaacgttttagaagttccgggtgttgcgtttgaagattggatgaaaaaccgggaccggattcttcatattttgagtcatccggcaattcaatgttcagatgctgttatagaggagttaaaaaagccagtggatgaatgcgtttgcctgatccagaagtgttcgtcagaaatgcagaaactttcagagttgtctaaatggagagaaaattggaatttgcagcaaaattgttcgaattatgaatatgcatttgtccgttccgtggatgaaaaaataaaacagttgaagcggggaatcaatttatccattcgcgtggtaaataaaacaatggaagaatatagtattttttatctggtggaaaatagagcggaagtcagcaatgctgcagtactcttgaacaattcttcagatgcaggttcagcaaaactggaagtatttcttggaatcaatggaggtgaaatgacggcatatgaaggagcttcttttacaaacatggtagaactgcgtccgggagatgcctgcggacagtgttacaggctgcacaataccgttgtgtcctccttgaaggacggagatgtgatatcggtgttattccatatcattgtggatcaaaaagtaatctgcagctgtaatcagagttttttgtatcgggtaaatgaaacaaaggggctgctgcgggaaaaactgcgttccgatgtgtcaaaatatgaaacaagcgttccggcgttttctcatgtgatccggggatttgggcgtgaaacagaaaagcggctgatccggcagtatttagaacagcagtttgttgtgatttacggaccttcccgtgttggaaaatcatctttggtaaactacatttcgaatgattatatcaaggtgtattcggagcaagaaggaaaatccgtgattgccataggaattgcggatgacagacatggcaatgattacagtgacgatatgctcaatgaacaacaaaaagtttcgtttgacaatgtgtcagatatcctgagatatttgtttatcagtcctttaaaaattgcatttgcatcaggctccggaaaaagcaggatgaggtgtaaatatgcaggagaaaaaatatcggatgcagcagaagcggagatcaatgatgtgatccgcagcgaaggcagtgttcgggaaattgtagcaatggtttcacaaatcttggaggaaaacaattgtcagatctggtatttattcgatgaatttcaggaaatcgtgaaacagtggaagggggatacaaaagaatttacggatttatgcaatgatgtgatcaattatcagaatagtattaaaatcgtgatttgtggatccgatgagctggttcgtttatatcaatgtgaaaatgatatacagtggagtggatttgttcagaaaacagcggacaaaggtgtgatcgtgggacagttaagcagacaggattttaaagagatgatgcaggatgagacgatctggaaagaagtggcggagaacgaagagattccatggtcatcggaagcactggaattattgtatcagtacaccggcggaaatgcgatctgtggaaaattgttcggaaatgagttgatcacgaaactcagaaatggagaatttgaaaacagacagagattttatccatcggatattacgcaggtagcgtatgaattgttgaacagtgaagttggattggtgaaaaatcttctggttttgcatacgacaaagaatttggaagatgagatggtgtatttgttgtttatcgcgcatgagcttgtacaggacagaaacaaagcagatgtttccattcgcaggattcgggagttcttttctgccaaatcggcggttgaaatagaaaatgcattgaagattctgattgcccgcggtattttaaagagcaatgaaaaaaaacatcgatatggtttttctactatgttttactttgactttttccgtaatcaggcaacggaaaacaaactgcaggaaattgcggaacaaatgcagggaaatgtggcagaaatcgaggaagcaaaagtggaactgcatttgacagatccgaaagaaatttcagatacgatgattacattgtggagtgatcttggaaaagtggatgagagcaatccggataaaaatatacagaaaaagaagatacaaaattttatcggtccgatcatcaatgcaaagcagatcaatacgggggacggaaatatcaagatgaatgaaggcggagaagtaacgaacaacattcaaattaatattcaaaatatgtccactgcactgacgaacatcatgacaggacaacatgtgcttgaatcctatcaggacctgcccaaattaagcagttatattgcgtctcagcttactggtcaggatcagcgtttattagaaagtaaatacagggagttacaagaggaaggattgtccgtcgaacaacgtcagaacatacaagaagatatttatgaaatcagcagtccggcaattgatgccatagcaagtgattatgtggcggctgaaatgaatgcgattatgaatggaacgtattcttatgacgatgaaaatatgtccaatccggaagcaattggattgtctaaggataccatagatgaattgaagcaggtgcttccggccgggatacagatccaatttgattttgcaattatgctgcacaggattttttatcaattgaaggatgagaaaaatatcgattactgtccggttgcgattctctactgtaaactcatagaaggtctgttgaaggaaaagcattttgagatctatattaaaaaattgtccagagggaaatatccaaaagtaagagtggataaccaggagtttgaatggagctattttctggaccacaacggaaagcctgacaaaaagaaagtaaaaaaataccgtagaaaactgacactcgggtcattttcgtttcctcttggccggattgccaactgcaaagacatcgacagtaaaatcctcataaatcaggaagttgtagaggcattggcgacaccggttggagatgatatgacaaatgcaaaagatttgcaattatggaaaaagcatgcggaaatgcttccgtggattcgggaatacagaaacaggagcgctcatgaactgacaccgatatccagacaggatatggatcatatttgcagcatattatttgagaaaagagaattggagcgaatcgttactctgatccaacggcaatgatatgtcctatgcccgtttgcagtaagaggagggaaaaacatggggattattcttgaaaaatcaaagcttgtttttgacgaattaatcggttccagctcatttgatgagatttttaagaatagtatccgtgattactatacttatggattcaaatcctatgaacaattttccaaaggcagccagatcgtgaaagatcgatggaaaatattcagtaaagtgcttggaacaaaatgggattttgaaaaaagaaaaaacggacggaatcagattattttaaaaaccatgccatgtgggggagaaaatcctgtggatgatttttatttcctgcataatctcagcaagattggtgattatttgaactatttattggatcttgatccgaaatcgtctttgcagggagggatgggtacacttccggtcgaccaggaagtgttattgactgtagaaggggaaaacgggcttcaaaaattagaagatgtggatacgacagaacatgctgttattgaaaactggctgtgtggacgtgagacagacgaggaacatgcggatggaatttcacgggtcaggattaacaggcagctgaatgtgtggtctgccagtacacggtatatgacgaaaagttacaaagacaagtattcgaatttgggaaatcggacagaatatttgtactcgttgggggtgatcggagatttaagagatgcccccaacaagagaaacgaatggctgcgcaggcagtgggatttatatgatccaaagtttaaaaaatattttacaagtgatacagcaggcgatcatttctggtacaaatcaccgcttacaatggcactgatctgtcagtatggagcctgtggaaaacaagaggaaatgctgcgatttctggagaagctgaggacaatgtgcgagttcttttcccagtattatccgttgggagagataggaacattgctggctgccagatgttcgggaaaaatcggatcagatacaaagaaggtatttcgatttaagcataattatctgcaaaaaacattgtatgattataatctcattgatatgttgtcagcaattgaaaagaaatgtctgtgccagattcgatattcgcatggtaccaaccttcattcttgtgaagaaatcgtaattccactggaaattcgaatcagcgtggtaaacggacgggagtatgtattgtactatcatgttatggaacgcagaatccgggcacttcggttagaatttattgacaagatcgtattatattcccatgtgtcatcggtcaaaaaggtacggcgcattgttcgcagatccgggaaaaaaatcactcgggaagaaatttcatcagaagacattaaaatggatgatgaggagcttgagcgtcagatgcatcttgcagaacagatgctgccctacatatggggaaccggagttggaacgtgcgaagtcagggagttatggagagaacaactcatctcatttcagatgccggtttcctatgattcgaaaaaagaaaagtacattgggtcacgcctgaagaaggaaagcagatacggggtaagacagaccgaaatagaaatgtttcccacaaaggaagtaagaaactggatccgcagtttttattccagaatttgcgagccgtggaatataaatctggatgatttcagtatttcggatgatgtagaggctatgtatcaggtatattttcaaaagcagtatccggttgttgacgaaggaaaagagcataaaaaaaagcaggacacaaaatatatagaagaggtgtatgtgatagagggggaatgtattccggtgtcaagcggacacgaagcactgtttaatgaattgtggagcaggtatgcagttgttttggcaaacgctgtattaaagtgcgctgcagatcattctgtgaatgtgaaacaagtgcttcgggattctatcagatctgcatttgaatattatacttcagaggaactggaacaagtggcagaagagctggaaacttatataaaagagtcagaattgacagaccaaaatggaacgtccagatttatcatgccggaatgcgagtatctttttgatgttttaccaattacaaaagttgaagttcgatggctgctgaccatattagaagatccgttatcttccgtctttttgtcgcccccacagattcaggcagtaaaaagtgcaatagcgaaagctccgtttcaggtcggtccatttgagatgaaaaagatcaattactttgatcgatacaatctggaagatcggatactctctggaagaaaggaactgacgcaaagggggagagtgaatcaaagggaacgggaatttttaaagatcatatatgaggcaatggagtcggaaaagaaaatacggattgtatacaaaaactggaaaggggaaaagaggtatgccaactgtgcaccggtttggatggaatactcaagacgggatgatatttttcgcatctggtatgtacaaaatgaaagaatggaaatcaggacgatcaatgttccgagaattcttcgaatcatccaactgccggagaagaagtatgatctggaagaacagcgagagttgttggagcgcattttaaaaagaacagaggcgcatattcaggtcgaattttatcaagggaagcgaaatcttccggatagacttttgacagagttttctttatggagaaaggaatgcatatatgatgtcaagactaaaaagtatacgatgaccctgtattattccattcaggatgagaaagaaatcatgatacgtctgttaagctacggtccatatatcagaattgcagcatcggaggattcgtatattctggctgaaataaaaaagcggatcgtcaggcagagagaacttatgaaggaaaggactggaaatgggaaaacagagacggagccagagtaaagaagcgaaaaagctttcggggcaatgaaattgccccgggagctttttttgtgtaacttttttgccagagagcgccaaggaaaaaaatccgatttgatttatactgtacttgtaattcagaagagcgaaccattcaaacgcttctgaatacaaaatgtaacaaatgaatcaatgaatcacaatgaggaggaaatggtatgagtaaatttgaatattcgaaagaggctgcagaggctgtaaaaaactttcttacagagaatgactggaagtatcaatttgatgaggaagtcgggatgtttgaaatgaatctcaaaatcagagcaagaatccagaagattgagtatctcatttcgatcgagaaaaaagaaattgtaatgtatggagtttctccaatcggtgtagatccgtgtgatactgagcggatggcacagatggcagaatttatttgccgtgcaaattatggaatcaaaaacggaggatttgagcttgatttcagggatggggaaatccgttacaaatgttatgtagactgtgcgaatttgattccgtctgatgaagtcatcagaaatggaattctctgtatcggcgttatgtatgagcactattccgaaggaatccttgacgtggtgattggcgggaaaagtgcggcagaagcgcttgaggagaatgaggaagagttaccggagggaacattctgcggaggagagcaggatgaagaggaagttttgccaaagggaactttccgcagttgggaggattagtattgttatggaaggtgcaattactgtgacgatggtactgattattctggcgtatataggaactgcaatctggtttatctgtaagaggaggacaattgcaggaagtatcggagcatctattggatttctgggaggaggtggtgtgatcattccggttgcggaagcagtcgcaacttttgtctgttgggcagtcgtgatcggaatcgggttgtgtattctgggagcagtgtttgaatattaagtgatgagggggaaaaacgatgaaaaaatttgcgtttgcatccatggaagaatttgacgatttggatgcgattctttcagatggacagctgcatgtgtattataaccgggaacttccgaaaggatgtaatcctggttttgccagaattggatttgaaagatcggaaaatgggtatgtggtgatgacggatcggggaatccagtcagaaaaatatgaaaatcccatggatattctattgaaagagggggaaataagattttgctgtatgaaggatatggccgagttttttcatgcgattcagcccttattcctgaacgaagacgtttctgaaaatggtattcggaaagcagagagtgcccgatcagtgatcgatcgcaagaagctgcgtgccattacagaggaagaatgtgccagaaagacgatctggccggaagagattgccgatccgatcaagcagaaagtctttggtcaggacgcggcaattgatgcgctggcagaagcaattacaatcaatcagatgaagaaacaagaaaagctgcttgtgctggcatttttgggtccgccggctacaggaaagtcgacggtagggcgtgcgttggcggaagtgatgtccaaattatcaggaaataggtatggttttattgaaatctctgcaaatgaatatacgcaggaacacatgatccagaaatttctgggagctccgccgggatatgttggatatgggcaaaaaacagtactggaacctgtgcgtaagaatgaacatcatatcatcctgatgaatgaaatagaaaagtcacatgaaaaaatacttctggcattaatggaggcaatggataccggatttttgggtatggcagataattcaccggcaatcaatctgaaccattgcattcttctgtttacgtcgaatctgccaatcgatattgcgcaatatggtgcagcttctgattttgagcgctcggaaatgtgcaaggatgcatttacaaaacattgcggccggccggaaatcagcaggcggatccaggattttatggtgtttgagcctctgtcagaagaagcaaaggtggatgtgatcatcaaatttgcgaaagaagcactggaggatatgggggcagaacttgttcggatcgatgaacatctgatggcagattttttaaaatataaaacgaagtacggggcttcagaactgggaaattatgtgactcgtgcaattggcagaaggatgctaaaaaacagaaagccggaccttgtaacagggaaaaaagtaatggtgtatggtacggttgacaatattgaatttggaatcactgaaaggaggagcttatgagaaggctgcagtttttgaaaaatgtcataaaaggcagaaagaaaaagcatatcaccatccggttttcggaaacagttctggatggatttcgaagaactgtagggagatatccggcagagaccggagggatgctggcttgcagtgaaaacataaatctgatagatacatggtgtttcgaccaaaaatctaagaataccagtgtctcgtattcgtatgatgtggaggaaatgacggcggtattccggaaatggaaaggggagggaaaacgaagcgttggatttgtgcattcacatccggggacatacaggcagccctcgtatgatgacattgtgactgcgtggaatctgatgaaatttttcaaaaacgatttcttctatctcccgattcttataagcaatagaaaaggattgtttacactttacttttttgtgatcagaaggaagggaacaatgttggatgtcaatctggattatgtgctcggtgcaacagaagatgcatatgaaacggtcccattcagacagtggaacaagacctatcctatccagaaactggaagagtattatcagacagtggtctgcgaagaagaagcatcagaagtgcctgcccatgagtatttccagaggatcaaagatgtgtatccaaaacatgttctggaaaaagtccaggtgatcgtcggagtgggaggagccagaacaattgcggaaaatcttgccagaaataggtttaaaaattttattctgatagacggcgacaggatcgcaccatccaatattgctacacagggtgtctttatttctgaaatggggatgtataagacggaagcgatcaagcgaagaatcctggatatcaatccggaagcaaaagtaatctgtgtaaacaggtttttagatgatgaaatgtcagatgaagagtttgccgatattttggagaattttcccgataaaaaggcaacagattatctgatctatgggtgtacagattgttttgaagcaaataaacgcagtgctcttctcagtctgaaatatggaattccgtatattggtgcaggaatgtacagacaaggacttggcgctgaggtcatctttacttatccgggagtgactgcaagttgtccgcgctgtcttttgcgatctcgatttgaggccaatgaggaagggtatatcaacgatgtgacatcggaaggctgtccatcatttgccacagaaagactgaatacactgattggttatgttgcactgatgatcctgatgtatcaggaagcgccgggcagtccctatgatcatatgctggatgaagtaaaagatcggaattttatctggattcgtctcagtccttatctgggaacttcagaattgggaattacattatttgacaatgtgttttcggatccccgggtttccaaatatacatttatggatgagactctgtggcttccgcagcatccagatgcgccggaatttggagtcagaaaatgtaagctttgtgaaggagtgggggatttgagacagttgatacacaagtggccggatacaagaaaaatatgatcttctgcaaatgtgaagggagaatgctgcaatgcgaaaatttgtgaaggggacagatgaacagtatgcggatctgaagaggcggcttcaggatgaacagtgtcacgtatatcgaaaatgccagcttccggcatgctgcagcagaagcacatgcagtattgcatttgaaaaagactgtaatgcatacaaacttttgatcgataaaggaatcacatgttctgcgatgcggggaggaacggcattgatccagtttaagcagctgttatctgccggagaagcaatttttatcgatttcaatgatttgaaggtttttttaaagagtttgtcagtgctgtattaggaggggaaagtgatgggggatatatctatatacagatggatcatcttaggcgtgatcggaatgactgcagtgattaaaatcgggtatcaggtctacaacaggagacatggagtagtggacatacgcaggaactggtttggaagatccagagtaagaaaaaccagtggagtcaatgagtttggaccagttaattattatgcaaatgatcgccacaacagaaaagacaagtggtttcagttccagtataaaaaggtaggagatgagtggcttacgtatattctcagaatgccaagtctggagggaagagatggcaatctgcattttacgcacagatatcgcagaggaagcacctattggatctgttatgacccacagcctaaaactttaaaagatgcgcagagtataagtcgtgcatgggcagatcgggaactggagtatatagcaacagggacgcattttgaaaatcaaagatggtagttagtggaggagagaatttatatgaagaaatgttccaatccaaattgtgagtcatcgtttctttttggaaatgacaaaacggtctgtccattttgccacagcagactggaggacagttccgaaactgttggaggacggtatatctccaatatagacagagaagattttttcccggaacaaaatcagacggacgagtttataagccgacattttggaaagatcaaatgtcatggacgtattgccgagatcgagcatcaggagttattttattccgtcagacataaggtgtgtaataccattttccgaggagaaccatatcagtttgctcatcagactcttgagtatacaatccggttagagaatatcacggacggtttttcttccgaagtgacagatttttgtctgtatggaagttatcttggaagactgcaggtgggagatgaagttgtgatcaaaggaagagatctgggagataagaaaattgcagaaacgatatataatcaaacgatttcctctcgtgtccgtccaggtctgcagatttctgcctctgtattccgaatgatgtcgggagtccttgcctttttgatccttgcatttatatgtcagcttgttcagttgtttcaaagtggtgttattcagaggggatttgctgcatttgtagttgggatgatcccatggctgcttcttggtgcaggtggctggtttttgttccgaaggattttcccacggcgcagaagaaggaggtaggaagtgtggatctttacagacaaaattttttaaaagctcaggaaatcgcaaaaaaaatcgtgcaggcagaccgaaatcaatttctctcagaagttacttcgggagaaatctgtatcgatcagaattcttttgtgcctgctgtatccagatggtttcagctgcggggataccgtatgaaaacagatctggagactacggttcaaagtgcatgcagtgctgcccgtgaatggatccggagtgccggagcatcaggcggcagtgcggtttttgtaatagaagggaaaaacggaaaaacagggatttattatggttctggaaaacataacagaacggaggcactgtttggtggttctctgccggaatgttctggtgcggataccggatgggaaggagaagcgtactcatataacggaattgtgacaggaaccctgacgttatcgaatattgcagatgtggcggcacaaaccggaatcaaaaactattatgcagcatgcatcatagttccgatttcggaggaagaggtgcagcagagaattgcagaaaatgaaaggatggcggcatatctgaatgattataaatcctttcagagagtttatggaaatgtgggcagaagggtacaagaagttccgcttccgatcgttgttcgtgcaatcgctgtgttaaaagaagaaacagaatttcttattcgaaacacaggaacagggctggtcagaagtgcagtgcattttggtgcggcagacagttggtcgtaccatcagttgaaatctgtgattgtatcctgcatgaatcatacagatgagaaaccgcagagagtggaagcaatccggtgctttgaagtgaatggaattcatcgcaactggaaagaatgtctggcacttccctgcattttacataatggaaattatcattatatggcatcctggcagacgatcgaccatgcggcagggttttgtatgcctcctttggaatcccacccgggattttatgtgaaaaattatcatgtggatgagaacgcggaggaggtatttcctttgagtgaagcgatatcagaaccaggaatccatgtaggcaaaatatatggtgcaggatgggatgcagtgattccatatcactccctgctttcacacagttttgtgtgtggttcaccaaacaatggaaagacaacaactgtgaagcgaatgttgaaggaattgtatgacgagggcattccgttcgttgtgatcgaagctgcgaaaaaagaatatatcggcttactgtcagacattgcggaactgcgagtatacacaccgggaacagatggaattcgactggttgtcaatccacttcagccggaggatggagtattgattgaaaatcaggcagacgcagtggttcgtgcgctggttgcatcgcatggtggggagcatccgattccggaagcgctggacggacttttgaaacagacctatgaaaaatccggctggaattatgggatgatggcataccaggattcaaacaggccgtttccgacatttgcagatgctttgaagaatataccggaatatatagaaaaccatgcacagtatggaccggaagtaaagaaaaatctgcaggcagcgttgactatacgaacggaacatatggaatccggtgcgttgggttctattgtgggacagccgtctggcctgactgctcaggagctgcttgctgtgccgtcggtgatagaactggctgatttttcaagcagttctgcagagtttttgatgaatatcctgttgttcaaatttcatagttatttgtcaagacttccgcaggagcattctttgaagcgggtgatcgtggtagaagaggcacataatgtttttcgaaaaacgctcagcgaagaaagcggccgggcactgaacaaccattattttgaacgtatgcttgccgagatcagaagctcaggaaccggaatgattctcagtgatcagagaccaagcatgatgtcagaggccgtcatggcaaatacgacggtaaagatcgtacattctatgggggcagagaaagaccgggaactgatcggaagatccatggggctttctgaatttcagatcacgaaaacaagagaattttcaccaggagaatgtattatcggaatcaatgggagatatgggatacttcacacaagagtgcaggctttgcagacagctccaatgaaaaatgcggcatgtcatatctgtacatccagattccggtgcaggagggaagcggttcgaagcatgctgtgtacaatggatcagacgaagattcgatttcatctttccaggattcagagtcatccatataacatccatcagcttgttgcgaatattgatactatgctgagagagcttcatgtaatcgcatcagtggacacaaaggtgtgcctgctgggagaaattctttttatgaacaacaggatttcggaacaggacagcagagtgatcacaacttcgtacttcaattatgtaagaggaggcacggtatgagtgaattaggcggtgattatgatgatggagtaaacgtaggcggcgaagcggaagaagtgggaaacgaggggagtacaacatcgacagaaggaatcgagagtatgggatctgtgtcagaaacagaaatttcaatcggccccggtgaaacaagttccggaatgaatcagattctggagacgccgcagacactggagcaggcacaaaggagcgtagagacttatcatacagagtcgatttcacaaatattagaaaatgatggaaaatatatggaagaatcggatcgggccagagttgcagaaggtgtggataacatccgggcaattccttataatccttatggtgggaaaacaggaacctatagtttccgtgacggaaaaagtgaaatcagaatatctgcagtgaatgaaacccagatggaacgttcgaccaaacatgagacaaatcattttgcaagtaaaaatcgggagattattgttccggcgcctgacagacatgggtataccgtttataaaacggtggggactcatcagcaaagctggttccattctgcaaaaacaggtgaaaattttgattattctgaaaaagggcgtggtttaaacgagggacttactacgatgtataccaatcagcagctgacagaattaagtgaggaaaaagggcaggcagccagacagcaggggatttatgagcatacaacagaattgtgcacacaattggaagccatggtgggagaggatactctaaaagaagcatattatggcggaaatttacaggcattggaggaaaaggtgaacaatcttgcaggaggaaaagaatatgaatcattgcgggaggcgatggacagaaccctttcgaaagactatgcggaacggatgcaggcaatgaaggatgcacaggctatcttggaaaaaatgtatgaaaacggaggcggaaaaatatgatggattatgtgctggattatatggcagaaaaaggacagtatgcggatacccgggaggagcaggaacgtatggaacaggggattttattgtaccttgcagaatgtgggatttctgattctgttgtcagtgaatatcgcaaaaaatatgtaaaagcgcatctggagatcattgaccggaaagatctgaagcagtattttctctgttatccgttgatcagcgaggtagtgcagatagcgatagaacagaaaacagacggagaaatttcagaagaaagaaggggggaattatatcagctgatggaacaactgtatgaaaatggacttggagaaacctatattccgtactgccggtaacggcagacggaatagtgattatcggttatttagatattggaacagctgctgtacagtatgctctaccatttcttgctgatagagatagtagactttattgtttcgaatttcagtgcttacaaatccattcaagtacagttgattcatatgatgggagacggttgcagttgttaaagcgagcctttttgccagttcactctggtagatgggccctttttttgaaattgcaagaatcgccagtttggtaggatctgagaacatttttaagtgttcactgagctgctctggtgtaaagtctgccgggagaaaaaagtcaatcgcacaaaagaggattccaaggtgaactacatagggatgttctattttgtctgcaggcagactgtaaatgtcagccatattacaagtggaaaggcatggaaggatgaaagcatcctgggacagcgacattcccgttctgcgcagaaggatcttctggcagtctttagaggaaagcagagtatcacagtatgcataaaggtcgtgatattttataaaaacaggttcaatagcggccgcaatttgtgtcaacaggagaagtgattctttaatccaggacgttccatccagtaaaatctgcagcatggcgagttttgcatgggaatccagagagcttttcaaggtgcaatgcaccggatcggaaggaatttcttcaagtttcagaatggaagcagtccattttgcaccgtgatcttcttcaaaatgtttgtagatatcctcagaagaatctccgaatgcgtaatagagataaaagaaatcccgaatgaaaaaagcagggatgtttccttcatctgaaggtgtaagttgggtgtaaagtgggttggaaagattcggagaaaatacttttgaagcctccatcatttccagagccggctgaaaaagctctgtgatcagttctttttccggacgttttgccagaatgctgttacgcatagcaaggcagtcgttgtctaaaagttttcttgttaaaactccaaatgcttctacatataaatcaggtgtcagtttttgcatgatttcaagtcttcctttcataatctgtgttctgattccagtttcgatatttcctggtcaaaaaaatctccgcatctgctgattttaaaaatgcaaaagagcagaagagaaagaataccggttcccagaaaaatcatgggaatttctatattgtgtacaattcctgcgagcaggaaagaaagaaccggcatgacagcggtaccggcagaattaaaaaatccggcagcacgggccaggtactcaggttctacgattttgacaaacgttgtattgagaaatgcctgaaaaattcccatgcagcagccctggatacaaaacagtccgatccatacaggcagagaggcagcttccgtcaggagaggaagaagcgctaaaatcagatagaagagtccccacatgccgggagaacaccaggtatagacaaaagacggacggatccacttccggatcctcggatacaaaaacagaagcagcaggctggatacagtcgtcagaatgtctgagcaggccaggtattttgaggatttatgtaaaattccgctgatgtaggcagcagaaagagaggaaagaaccgtggcaagtgcgttgcataacaaaactccgagaacaaacagaagaaataacttgtttttaaaaaaatacagaacgccgccttttaaattcttccagtaattattttgtgttagggtcatatccggatgttcttctactttcatcgcacagatcagacctgcagaaaggaaaaaactcagcagatccagaccgatggcaaggccggggaagagggacacaagcactcctccagcggcagttcctgcgatgatacagatctgggagcagatctggttgagactgattccctcatccatcgcttctttggtgaggacttttggaaaataagaaatcccggcaggaatgcgaaatgcttcaatactgttgaagagaaaggtaaatgcgataaacatccagggctgcaggcaatcggccccaaataacagcaagaaggctaagagagaaaatcctcgaaggatatcagaccataccataactttctgtttttgcatcctgtctacgactggggctgccagaggctggaataaaacagtaggaagaacattcgctgtaaacacaatcgcggaaagactggcattttccgtcagtgcataggtcagccatgtgaatgtgacggaatctatgccgtcgccaagacggttgatcatattggcaaacagaagttttatatagtttggattttgaaaaagagtacggtacatgcagagcacactccttcctgatttattagataaatatctaatgaaattatattaaattataagaagaaagtcaataaataaaaggaggaagtaatacggacggtgaagagcagcagaaagcctttttttctgataatcttaagaaaatattaatgatttacccagaaaatatttttaaaatcttttatataatagactgcattgggagaggaggtatgtcgtgaaaaaggtcatagaagtgaaaaatttatacaaactgtataagcttggagattctgcggtaagagccctcaacggagtcagtctggagatttatgagggggaattctgtgcgatcgtgggaacctccggttctggaaaatcgaccatgctgaacatgctggcaggtctggaaaaaccgacaaaaggtgaagtgatcatagatggacagcatattgaaaatttaaaagaagatgagctcgtgaaataccggagagaaaaagtgggatttatttttcagtcgtttcagttgttgggcagcatgaatgcactggagaatgtggccctgccgttgagttttcgcggggttccaagagcagaacgtctaaagaaagcagataagatgctggatctggtgaagcttgggaaacacaagaagcatcttcccaatcagatgtcggggggacagcagcagagagtgggggttgcaagagcgcttgtcgtagatccaaagattatttttgcggatgaaccaacaggaaatctggattcacgtacatcgcaggaagtgatggcgttgatgcagcaggttgtcagagagcagaaaaagacgttggtcatggtaacccatgatgaccatctggcaggttatgcggaccgcattttccatattatagatggaaagatcgtcaaggtagagaacaatcgaaaaaaaacagaggaatgtaacaagcagggaggaaaagagcaatgaaacgatggaaacaggcagtgggagtgatcatgagttttgcgttggcagtggcaatgctgcttccggtcagcgcacaggcacaggagagtggaattcccacgatcagactgacacttggaaacggacagacgacaccgcaatttgcagcgggggagacaagcgaactgttgatccgggtgtggaacaagggaatgcaggatgcggaaaatgtaaagatctcaccgatccttgatgacgcagcaagctggccgtttgagattacaaatatgaataatgaattggaattaggaaagattcaggcagggcagtatgcggaggcggtatggaaagacttaaagatccgggaagatatcgagacaaaatcatacaaactgggatttcaggttctttatgatgacgggaagaatcaatttcagacgacaccgcatatttttgtaaagacaactgcaaagcctgcagaacagccaaatgacaacgaacagccggaaatcccgcaggagccacaagatggaggcgatctgtcaggaagtgtgatgaacagtgagccgatcatctccggaggagatggtggttcgggcggtggaacgtcttctgcttctgtaccgagggtaatcgtgacaggattcaatacagatccgggagaggtcaatgcgggcagtaatttcagactgatcatccacttgaagaatacatctgcgacaacagctgtttccaatatgctgtttgatcttcaggcaccggcagcaggaactgatgcagcggcagaagcacctgcatttttaccggcatctggttccagttctatttatctggatgggattccggcaggcggtacgaaggatatcgccatagatttgaatgcccgggcagacttggtacagaaaccatacagtattgcaatgtccatgaaatatgaggatggaaatgccgcacagtatgaaagtgcatccagtctggcaattccggtcaaacaggcggccagatttgaattgagtgaaatcgaggtagctccggaatccgtagaagtaggagaagaagccaatattacctgcagcctttacaatacgggacgcatcaaactttacaatgtaaaagtcagatttgaaggagaagggctgaccggaaaagaactgtttatagggaatattgaatctggtgcaactggatcgatcgatgggatcgtgacagcgaatcaggaaatggatgaaacgaagaaatgtaagattgtgatttcgtatgaggacgaatcaggaaaaagcgcagcgatggagaaggaatttgctctgacggtgatcccggctcagagtccggcaggagatatgatgccggtggaagcagaggtcacagaaaaaaactttccggttgttcctgttgtgctcgcagttgtaattgtggcaggaattgttgcaattgtgctgtttcgcagacataaaaagaaaaaaatggaggttttggaagaggaggacttgctaaatgaggtggatcgatttactgaggatgagtagcaacagtctgaaacgaagaaaacttcggacatttctgaccgtattaggtgttgtgatcggtacggcatccattgtcgttatgatctctcttggcctggggcttcaggagacaatgtatcaggaaatcgagcagtccggaggtgttaccagtctgacagttaccggaaaagactccatgcagatgggtggtttctacatgggagacagcagtaatgaagaagaagcgacgaaatatacgaccgatgaagtggtagaacaattgaagcagctggaacatgtggcggatgttcagccgattctggaagttagtgcccttttaaaaaagaacggatatattggctattgtcctctgacaggaatgacggaagaagggttaaaaggactgaatatccagctggctgatgggggaaggctcccaaaagcaggaagtcctgaattggaactggtcattgggaacaatatcatcacaaatttttcagaagagtcaaccggaaagatgtattgggagacaggtgtccttccggaaattgatctggcaaacgagtcgctgttcctgatcctggatgagcaggcatattattccagccagtctccgtcaatgggtgcagccgatccggaaggaggaaacggtactacacagcagaacagcggaccgccgaaaaaatatgtggtgcatgccagcggtatggtagagggagatattgatacatataatgtgcactcttattcggtgtattgcagtctcgatacgctgaaagcaatgttgaagaaagaattccgagggagagcaattccgggacagccaacgacaaaatccggaaagccctacaaagattttgtgtatacatcgattaaagtcaaagcagatgatattgatcatgtagatgcgctgtctacagaaattcggaacatgggatttcaggtcaatacaaatgtagaatatatgaacagtatgaagaagcagtttgccatggtacaggcagtgcttggtggaattggcgctgtttcgttatttgtagcggcaattggaatcgcgaatacgatgatgatgtccatttatgaacgtacaaaagagattggagtgattaaagtattagggtgcagtcttcgaaatatcaaacagatgttccttttagaagccgcatttatcggattcattggaggactggtcggaaatattttgagttttctgctctcctttgcgatcaatgcaattgtagcgaacagcggggcaatgggaatggaaggaaatatttcttatattccgttctggttggcagccgcatctatgatctttgctgtatttgtaggaatggcagcgggatatttcccggcactgcgggcaatgagactgagtccgttggctgcgatccacaatgaataaaggcagtgaatctgcgataaaatacctgggtgcaggaagtaaagactttctgtgcccaggtgtttttgtgaaagtggatgttaaaattttgccggttaaggtagagaagtttgtacattcgtgttaaagtagagtatatctgcaagaaagtaacgggatggaggagaaaaacaatgtttcgattatggggaaaagaatttaaagacaaccggatgctgcgggacactgtgatctgtgacgattcggatgagacacgcacacataaaattttcaatgcgctggaggaaatctgttatgaatttgatctgagcaagccaatctggctggatgtaacgatcgcagaatttaagaagcatgcaaaggcaaggttttatcaggataattttgtggattccattgattttgattatttggagatccagatcattgaggagtagcatatgaacaagaatacattcagcaaccgggtgacatggtacaatttcatattgtgtatttttgtggtgtggattcatgcacagaatgttgatctgtttacagaagtagtgatgatcgatggaaaaccgctgttcaatcagattgagcagacgatcgtttccgatattgcagtggttggtgtggcaggatttttcctgtgttccggatacctgttttatagaaattattcctgggggaaagtgctggaaaaatataagacgaggtttgtgggattgttgattccatatgtgatctggacactgctttattatttcattcatgtagtggtatcctatatcacacctttacgggctgtgttcaatgaagcaccgatcacagtaacctggaagggaatcgtggatgcagtactcaattacagatactgtgcgtttttatggtttttacagtttttgatcttatttgttgtgatttctcctctgatctatctgctgatcagtaatcgatatatgggaatcgtggcgatcgttcttgtgctggtgattgacagtacgggaatctgcggggatctggcattcggaggtgtacaggcacaggcgttttgcaactggctgtttatttatatgacgggtggatatatcggagttcacggaagcagtgcagtagaaagtaagaatacaagctggctgctgcttttggcgagcgcgatccttgcagttctggcgtattattttttcaaacattcgccgagtatgttcaccaatctgatgtatcttctgctgtttgcatctgccttgtggtgtctgatctgtaaattgccgcttccgatggcagcgagctggcaaaaacatacttttatggtatatatgacacattttctgatcgtgcgggggatgaacgtactggtgagtaagtatctttctgcttccatgtggccgggaatcctcttgtttttcctgcttccggcgctttgctttgcactgatcgcactgttttggcgaatctgtggaaaaggacattcttttgtgtggaaaatgttgtccggaaacaggtagagtgtggaaaacttgttatttatgtcggtaataaaatacagcgacttgtgttctgtcacgcagatttagtttatcaaggatggaactcaggtaattccggatggttccttcactaagaaacaggcgagaagcaatttctttgttactgagaccgtcagcgatcaggcgtataatttcaagctcccgttcgctgatgtcgtagtcttccaggtgaaatgccggaccggtttgaagaagctcgggaatcttggaaatgatttcatttccgaaaacagtctgtccggagcgaacagcgtgcagtgccgggatgaggctttcgtaatcctgtttgaggagatagcctttcgcaccaagttttaatgcccttacaatatactcatcatcggagaacgtggtgaggagaaggattttcgcatcgggaaattcttttaatatctcagcggatgcgtcaagtccgctgagttctttcattctgatgtccataagaagtacatcaggtctgtatgttctgaataatcttactgcgtcttttccgtccgtgcctgtggcggaaacggtaatatcaccgctggcttccagaatggttttcagtgcgccggagacaaaaatatcatcatcaataattacaatattcataaccttaatactcctgttcttttgggatagtgataaaaaggcggaagcctttttggattgtgatctgcaggtttccgttcaggattttgagccggtcgttcatattggaaagaccgatccctctgcttgagaataatgcttcccggttgttttctgagagggaaagcccttcttccagggtgccgttgtcttcgatacaaagttgatacagagcaggatgttcccgcatggtgatctgtaccagagtggcattgctgtgtctggccacgttggaaagcgcttcttttacaatgctgataaaacaatatttgatttcccgcggaacttcaaaccccatgtcatagttcagagttacaggacagaacgtaaaatctgaggtcaggctttcggccgtttctttcagattcagtgattcgtcatgaagatcgtggacactggtgcggatgctggtcattgcctgattcagagaatgatccagatcatccagaaccagtgagagtgcatcggaagcattgatggccttggcggcgcctgttatcaggatggagcgggagagcagatgtccgacattgtcatgaatttctctggcaatccggtttcgttctttcagtgtggctgcataaatttcgtaatcctgtttttctgcaagcatcctgtttttttcttccagaaggagatttttttcggtgctgtcatctcttagtttcatgagcttttgttccagacattctgcggcttctgtgcggttttgcagacaaaaagccagaagaaacaagaagattccccagaaggaaaaaagaggaatttgttctccgtctgaccagatgccgtaaaagtaaagaacgctgcatacgagagccggaacatgatattgatccagaaggagtacataaaatactgcgggaaaaaacagaaacatttccggaatcagaaaagcggccgctataaaagcagtacacagaaccaggtgaagccgttttgaccgtgaaaaataactggtacagcacaaacataggcacaggagaaaggcacatacaaaaaaataatccggttttctgaaaaaaaggaaaaagaagctggacaatatgaataatccagtattttcaagatggtgcatcgtataattcctcccggtaaacagatttatcattggatatcctcagtataatacaaaatcagaatccgggcaaaggaaaagacaaaagagaagatggaaagtgacatttgtcatgtggagaaatgacagcgttcactaccggatgaaaagcaggcagtttataatttgggtatcagctgtaggaaaagaactaagttcgatcaaacacggaggagatatatatgagtggaacagagcattttcagggaaatgaaatcatacagatagaaaatcttgtaaaaagatacggttcttttgttgccctggatcatttgaatctggatgtccgggaaggtgaaattttcgggcttctgggaccgaacggatcaggaaaaacaacggtgatcaactgtatgctggcacttttgaaatatgataaaggcagtatacgaatatttggccaggagatggcaccggatcattatgaggtgaaaaagcagataggaatcattctccagaatgtggcggtttttgatgagctgacagtatatgagaatattgattatttctgtgggctttatgtaaaagagaaagaaaaaagaaaaagtcttgtgaaagaggcgattgcttttgtggggctggaggactatcaaaacacaagacccaggaagctttccggcggacttttaagaagactgaatattgcctgcggcattgcacataagcccagattgattattctggatgaacctacagtggctgtggatccgcagagcagaaaccggattctggaaggaattcaggagttgaacagacagggggcgaccattgtttatacctctcattatatggaagaggtggagcagatctgcagcaggatcgcgatcatggatcatggaaggagtattgctgttggcaccaaagaacagcttaccgggatgatcaaaacaggggaaaaggtgacgatcgagacggttatactaagtgaggagcagcttgcaggaatcagagagctgccgcatgtattcgctgttgattatcaaaatgacattcttacggtacagtgtacggaagccaggcataaccttgtgcggatccttcactgcctggaggagcaggggactgcttttggaagagtctactcagaactgccgactctgaatgatgtatttcttgaaattacaggaaagcagcttcgcgattagagggggagagagatgtttcatttgataaaatacagtgtgatcagaaaagtaaagaatttcagtatgttattttggccctgcatgtttccgctgattctcggaacgctgttttattttgcattcgggaacatttccgagtcagattttgaaactgttcaggctgcttttgtggaagagaatccgggagattctgcattttccgcatttctggaagaagtcagtaaagaaggaactttgatctatgtgcaaacaatgacagaaaaagaagcgctgcagaagcttgcggatcagaaaatctccggaattttttatggaacagaaataccttatctgaaggtaggaaaaaacggacttgctcagagtatcatgcaaagccttttggagagctatctaaatggaaaagatacgttggaaacagtgtcagatgtatatccggaaaatatggaaaaggcagttgccgcgatgtcggactatcaggctctggtggagaatgtttcagcaggtggcagaacgacaaacgggaacgtgggatttttttatgcgttggttgcgatggcgtgtatgtacggctgctttatcgggctgggttctgcgatgtggctgcaggcgaacttgagtgctttggctgcgaggcaatgtgtatctccggtacacagagtgaagatgatactgacggagctgatttcttcttttatcctgcattttttgaatgtggtgattttaattgtttactgcaaatatgtacttcagatggaattccagggaagtatgggaaaaatgctgctgattgtgatagcgggctgtgtgatcggagtgagtatggggattctggtgtgcagtatcggtaagttcagcgaggggatcaaggttggaatcatgctggggatttccatgacaaccagtgtactggccggtcttgtgaatgtacagatcaaatatgcggttgatcgtgcattgcccattgtaaacaaactgaatccggcggcagtaatttcagatgctttttactgtattaatgtgtacgacgatccggtacgattcagaaatgacattcttacattatttatcatgtgtacagtaattcttgcagtttcatttgtgatcgtcaggagggaacgttatgacagtatttaaaggatatataaagcttatcggtcggaacagaatgttgatactgctatatgttgctatttttttcgtgtgtacgcttctgtttcagtccacatcgggaaagtcagaaagaagttatcaggcagaaaaactgaatatgggaattgtcgatgaggatggaggagttcttgcagaatctctgacagaatatcttggaaatctgcatcatctgatccctgtagaaaatgacgtttctgagatacaggaaaaactgtattacagggaagtggagtatgtggttagaattccagagaatttttatgaaaaatgtatcaaaggagacaaaaaacttactgtgacaaaaatcccggatacatattcaagccgatatgtagatcagcagatcaacagttttctgaataatgccagaacgtatcaggcagcaggatttacagaggcggaagcagcgagtgctcttgagagaacacaaagtgtgaaagtaacttttttaaagaatgaaaaaagtacagaagatgctccgtatgtatactattttcggtatatgccgtatctgtttctggcgttatttggatttgtgatgggaaatattctgattgtttttcataatccggatttgaaaaaaaggatggcggcatcccctgtttccggaagaagacaaagtctggaggggattttgtgcatgggtctggcagggattgggctgtggatttttgtaattgcaattgcgattgtattttatggaaaagatttttatacatctggaaattttgcatattacctgttgaattcggcatccatgctcttcgcagcgattgcgctggcatatctgattggagtcattgctccgaatagagatgcgttgactggaattgcaaatatcatttctctgggaatgtgctttctgggaggtgtgtttgtacctcttgaatttttgggaaatcatgtaaaggttgtgagccaattctttccggtatactggtatgagaaagcaaacgatattctttctgatttcggacatctgacggcttctgcaaaaggacagttcttgcaggcaattatgatacagcttgtttttaccgcagtatttgtctgcctggtattggtggtggaaaaatataaaagagtggaatcatattgattggtttcaggtcacgcgatataataccaatagaaaaactgcatgggatgattcctgtggcagagggagtgaaaaaagaggagtaaaatcggatgaaaaagatactcatcatagaagacgaccgtgcactcggagaaggtattgcgctggggcttggaacgaatacatatgaatgtacccgctgtgaaaccttgaaagaggcggaggaagcatgggagaaggaagtatttgatctggttattctggatctgaacctgccggatggcagcggctatgattttctgaaaacatgccgcagtcagtctgacattccggttttgatgctgacagccaatgatctggaaataaatgaagtaataggattcgagctgggcgcgaatgactatgtgacaaagccgtttcatctggctgttttgcgcgcgagaattcaaaatcttctgcgaatgaccgcaaaagaggacaaaaatgtttatgaggatgccaggtttcgatttgattttgcaaaactgtattatcaaaaagatgggcagacagtagtccttagcaatacagaacagaaacttttaaaactcctggtagacaatcaaaaaaccacacttagcaggcagatgttgatcgaccgggtttggacagacggtgcagaatatgtggatgagaatgcgctgtcagtagcgatcagcagactgcggaacaagctggaggatacgctgtcacgaccgatgtttatccagaatgtgtacggcatcggttatgtgtggcagccggcaaaggagaagacatggcgtggataagcagaaagacctatgaacatctggaagagatgctggatgctgcaattgcggagaagtttgaagagtctgcctatgacgaaagtgaaatgtccagactggagacaaagtggaaacgcttcttaagcgcatcggcattgagtgcggataatgtgaaaaaagagcatcttgcggtgcaggagatggtatcggatatttcgcatcaggtgaaaacaccgatcgcgaatctgcgcctgtatggagaaatcctgcaggagcgcctggaaggtgaaaataaagcgcttgcacaacggttgatggagcagacagaattactggatttcctgattcagtctctggtcaaaatttctcgtctggagtccggtacgatacaggttcttccgaagaaacagcatctttgtccgttactggaggcagtcatcaaacggggggaagaaaagcagaaaaagcgaaatatcaggctgttgaaaacgggatgggatgcagagctttctgcccgctttgaccggaagtggacagaagaagcggtatacaatattctggacaatgccttgaaatatacgaaagggagcagtacggtaaaaattcgtgtgaagccttacgagttctttgtatgcgttgaaatagaagacgaaggtccaggtgtgatattggatgaagttcctcgtttgtttgatcgattttaccggagtccgcagatgaaggacagagaaggtgtgggactgggattgtttctgtcgcgggaaattttgaaaaagcaaaaaggatatatcaaagtgaaaaatggagaaaagggcgcctgttttcagatctatcttccagtgtgaatgatcacctctcaggagaatctttcaaaactgttagatttgagaaagaatgaggaaagtgttgtgtgataaagtctattcatagaagttgaataggctttttctatacatagaacagagaggagattgggtatgggaacgatattaaagaccgagctattgaaaaaatattacggaacgggagaaaatcaggtgcgggcgctggatggaattgatctttcgattgaagacggagaatttatcgcagttgtgggaacttccggcagcggaaaatcgacacttctgcatatgcttggagggctggaccgtccgacttcaggaaaagtatatgtggatggcaaagatattttttctctgaaggatgatgcgttatgtgtattccgcagacggaagatcggatttgtattccagagttataatcttgtgccggttttaaatgtggaagaaaatatttgtcttccgatcgaactggatggaggaaaggcagatcgcagttatatccgggagattgaagaggtgctgggaatcgagaacaaacgaaaaagcctgccgggacagctctccggcgggcagcagcagagagtggcgattgcgcgggcgctggcggcaaagccggcgattgtactggcagatgaaccgacgggaaatctggattccagaaccagccaggatgtgctgggacttctgaaagtgaccggaaatcagttcaaacagacgattgtgatgatcacgcacaatgaagagattgcccagatggcagaccggatcatccgaatcgaggatggaaagatcctggagaggcggtgatcgaatgaaagtaaaaaataaagcaatcatcaaaaaactgtcgcatcgggtgctggcagcaaaaaagaagaaaaatatcatcagcgttcttgctatcgtgctgaccactgttttatttacagcggtgttcaccattggcggaagtatgatcaaaagtacccgggaaagtacgatgattcaggttgggtccagtgcacatgcaggaatggagcgactgacaaaagagcagttcgatattgtgtcaaaggatccgaaaatacatggtgtttcttataatatttatgcgggaaatgcagtcaatcctgaattaaaaaattttcctgtagaggtgcgctaccgggaggatctggatgccaaatatacgttttcggagccggagacaggaagaatgccaaaagcaaaggatgagatcgcagcaagttctcttgtcttaaaagatctgggagttccgtgcaggcttggagaaacatttacgctggagattgctgtgaatcaagagatcattcaacatacctttacgctggtcggatattggaaaggaaatcagggaatgatggcgcagtgtgtgaatatatccagagagctctgtgaagaaatcgcgcccactccttcagagccatactacaaaaatacggaaaattacagtggatacatggatgtggaactcaatttttcgaccgcatggaatatccagaagcaggcggatgcgctgatgcagcgctgcggatttgattcgaatcaggtgaaatgcggggtgaactgggcatacgagacagacagtattgagacagaggatgcgatcattctggcaggtctgctccttttgatcatgctttccggatatctgatcatttataatgtgttttatttgaatgtgttcaacgatattcgtttttacgggctgttaaagaccattgggacgacggggaggcagttacgaagaatcgtgagaaaacaggcgtggagactctgtctgtttggaattccggttggactggcacttggctggtgtgcaggaagagtgctggcgccgatcatgatgagcgtattggatcagcaggcggatgcatattcggcaaatccgctgatctttgcgggagcaacattgtttacgatttttacagttcatatcagctgtatcaagccatgccggattgtatcgaaaatttctccggtggaagcagtgaaatataccggacagagggtacacaaaaagaaacggaaaacaagaggatttcacacttggtccatggctgcggcaaatctgggacgcagccggaaaaagctcgtgctggtcgcaggttctctgtctctgagcctgattattttgaacagtgtgtatactacagtgcagggctttgatatggataaatttctggaaagcgtgatgatctcagattacatggtgacagatcgaagtgtgatacagtatcttggatatcgggagcagcagggtgcgacaaaagaatttgaagaggcgctgaaacagcaggaaggcatagaaaatctgtctgaaatttatgagtctgggtgttctcatgtcttttcggaagcagaatggaaaaaagtgaaacagattatagaaactcccaagtttcaggaatctttagagcatccggaagatgtggaaaggatgaaagaagagaaggcggattattttacactgtatggaattgatgaatatctggtggatcagatcgtggtgtatgccgggacattggactgggaaaaatttaacagtggaaactatattctggtgaatacttataatacagtgacaaatgaggatcagatgccgttgtaccagccgggggatagggttacgctgactttttcaaatggatccgcaaaggaatatgaaattctggcaatggcagagatcccgacagcagtaggtgatcagtcttacggctatccatttgatatcgaatgtattcttccggcaggcgagttgaaagcacaggaaggtgaaagacagccaacgcgtgtgatctttgatgcaaagaaaggatatgaagatgctgttacatcctggttaaaggaattttgtggcggaacagaaaattctcttgcgtaccggaccaaaggagattatctgcaggaatttggaaaaatgaaacagatgtattctattgcaggaggtgcacttagttttattcttgcgttgatcggagtgctgaattttgtaaatgtgattacaacatccattctgtcaagaaaacaggaatttgcgatgatggaatccattggaatgaccgtcgggcagcagaagtggattttgcgcttggaaggtctgttttatgcagtactcaccattttcatcagcgtgtcactgggaagcgcaattagctatgtggtggtgagagcggtgactgctcagatgtggatgtttgagtatcattttaccttggtgccgattttatacagcataccaatattgcttctgatcacctggctggtaccggaattctgctatcaaaggatgcaaaagataacggtagtggaacggcttcgtgaggtagaaaattagaaaaaaatcgacttgacaaacagaaattgtcagtgtaaaatgcaaaacatatcagacaaaggcgtcttttacgtatatttttacgtagagggggcctttttttgttgtaataagaaaatctgattacaggaggggcttgattatgtgttcaattatgggatattgcggtgtttgcgatgatctggaagcgtttcagaaagggtttgctaaaacaatctccagaggtccggatgacagcaggatcgtagatacgggaaatggtctgcttggatttcacagacttgcaatcatgggactgacagattccggaatgcagccattttcgcttggcggcagctatgtggtgtgcaatggagaaatctacggatttgagcgtttcaaagaaagcctttctaaccgttatacatttcagagtgattcagactgcgaggtgctgcttccgctgtatgagacatggggaactgagatgttcaaaatgctggatgcagagtttgcctgcatcatctacgacggaaaaacaggagactacattgcagcgcgagatcccatcgggattcgtccgctttattacggatatgataaaaagggagttctcgtactggccagtgaagcgaaaaacctgatcggcttgtgcgaaaaagtccgcccgtttccacccggacattactataaaaacggagaatttgtctgctattgtgacattaccagagtagaggaaatctgttgcgatgatctggaactggtatgtaaaaatatccgggaaaaactggtgacaggaattgaaaaacgattggttgcagatgcgaaagtcggatttctcctttccggaggactggattcttctctggtctgtgcggttgctgccaaaaagagcaggactccgatccgtacatttgcaatcgggatgcaaaaggacgccatcgatctgaaatatgcaaaagaagtggctgattatatcggaagtgagcatacagaagtgatcattaccagggcagaagtactctcggcgctggaagaagtgatcaaaattctgggtacttttgatattacaacgatccgggcaagcattggaatgtatctggtctgtaaggcgatccatgagcagacagacatccgggttctgttgacaggagaaatttcggatgaattgtttggatataaatatacagattttgctccgtcagcaaaagcatttcaggaggagtcccaaaaacgtgtcagggaactgcacatgtatgatgtgcttcgggcagaccgctgcatttccgtaaactccctggaagcaagagtcccatttggggatctggattttgtacgttatgtgatggcgatcgacccggagaaaaagcagaatgtctatcagaagggaaaatatctgcttcgtcatgcgtttgaaaaagaaggatgcctgccggattccattctctggagagaaaaggctgcattttcagatgcggtcggacattctatggtagacgacctgaaagaatatgcacagacttgctatacagaggaaatatttgaaaaagaatgtaaaaaatatacatatgcacagccatttacaaaagagtctctgctgtatcgtcagatttttgaaaaatactatccgggacaggcagaaatgattgccggattctggatgccgaacaaggagtgggaaggctgtgacgtaacagatccgtcggctcgtgtactggcaaattatggtgccagtggagagtaaaaggtgtgaataaaaaagagaggaatagaatcatatgaaaaaatacatggaacaagaagcaaagagcctgtatcgggaacagtttgagcatgataactgtggaatcggtgcagtggtgaacagcaaaggaatcaaaagtcataaaacggtagaaaatgcactgaagatcgtagaaaatctggaacacagagcaggaaaagatgcagaaggaaagaccggagacggtgttggaatcctgctgcagatctctcacaaatttttccagaaagtctgtaaagagcaggggattgatcttggaaaagagcgagagtacggaatcgcccagtttttctttccacaggaggaactgcagcgcaaccaggcaaagaaaatgtttgagatcattgtagaaaaggaaggactggaacttcttggatttcgtgaggtgtcagtacatccggaggttctgggagaaaaggcaagaagctgtatgccgcatattgtgcaggcattcataaaaaaaccggaacatgtggaaaaagggctggagtttgagcggaaattatatattgcacgtcgtgtgtttgagcagagcaatgataatacgtatgttgtctccatgtccagcaggacgatcgtatacaaaggaatgtttctggtaggacagcttcggacattctttgaagatctgcaggatccggattatgagtctgcgatcgcactggtacattcccggttcagtaccaatacaaatccgagctgggagagggcgcatcccaatcgctttatggtgcacaacggagaaatcaacaccattcgcggaaatgcggacaagatgctggcaagagaagaaacgatggaatccgatgcgttaaaagaagaactgcacaaaatccttccggtagtagataccagaggatcggattctgcaatgttggacaatacactggaattccttgtgatgagtggaatggagcttccgttggccatgatgatcgcaattccggagccatggagtaagaacacgaccatttctcaggatgtccgtgatttctatcagtactatgcgacaatgatggaaccctgggatggtccggcttcgattgtattttctgacggtgatgtcatgggagcagtgctggatcgaaatggtctgcgtccatctcgttattatgtgatgaaaaatggagatctgatcctgtcttccgaagttggtgttctggaagttccggaagaagagattgtattaaaagaacgcctccatccaggaaaaatgctgcttgtggatacggtgaaggggaaaatttatcaggatgaagagctcaaagaaatgtatacagccaaacagccatatggagagtggctggacagcaatctggtggaactcaaagatctgaagattccgaacatgcgtgtggaagagtatgatccggtgaagagaaaacagctgcagaaagcgtttggatatacgtatgaagaatatcgcaattccatccggaatatggcattaaacggaggcgaatccattgcggcaatgggtgtggatacaccgcttgcggtactttccgaaaagaaacgtccgctgtttgattattttaaacaactttttgcacaggtgaccaatccgccgatcgatgcgatccgtgaggagatcgtgaccagtacgactgtctatgcaggcaaacagggaaatcttctggaggaaaaggaagaaaactgtcgggtgttaaagattaacaatccgattttgacgaacacagatatgctgaagatcaaacagatgaaaaaagaaggatttcgggttgcagttgttccgatcacgtattataagagtacaaaactggaacgggcactggagcgtctgtttgtggaagtggataaagcgtataaagacggtgcagacattcttgtgctttctgatcgggatgtggatgaaaatcatatggcgattccgtctcttctggcagtttccgcagtccatcagcatcttgtggcaacgaaaaaacagacttcactttctctgatcctggaatctggagaaccaagagaggtccatcattttgctgctttgctgggatacggtgcatgtgcggtaaatccatatctggcgctggatacgatccatgaactgatcgaagaagagatgttggagaaagattattatgcagcagtcgaagattatacgctggcaattttgcacggaattgtaaaaattgcatccaagatgggaatttctacgatccagtcttatcagggagcgaagatttttgaagcgatcggaatttcaaaagaagtgacggatcaatatttttccggtacagtcagccgtgtcggcggtatcacaatggaggatatcgaaaagcaggtagatgagtatcatacaaaagcctttgatccgttgggactgtccaccaatctggcattggagagtatgggaaaacacaagagaagagccggaggggaagaacatcgctacaatccggagaccattcatctgctgcagcaggcaacgtggaccggaaattatgagttgtttaaagagtatacaaagaagatcgatgcagagcagacaggatacctgcgaagtctcatggattttgtgtatgcaaaaaatccaattccgctggatgaagtggaaagcgtagaagagattgtaaaacgctttaaaacaggcgcgatgtcgtatggatcgatctcacaggaggcgcatgagacactggcgatcgccatgaatcatctacatggaaaatccaactccggagaaggaggcgaaagtgatgagcgtctggattctgcaaataccgaaacagacagatgctctgcgatcaaacaggtggcgtccggaagatttggtgtgacaagccgttacctggtcagcgcaaaggaaatccagatcaaactggcacagggtgcgaaaccgggagagggaggtcaccttcccggaaagaaggtatatccgtgggttgcaaaaacaagacattccacaccgggagttagtctgatctctccgccgccgcatcacgacatttattccattgaagatctggcacagctgatctatgacctgaaaaatgcaaacaaatattccagaatttcagtcaaactggtttctgaggcaggcgttggaaccgtagccgcaggtgttgcaaaagcaggagcacaggtgatcctgatctccggttatgacggtggtactggtgcggcgccggaaagttccatccacaatgcagggcttccatgggaattaggtctggctgagacacatcagacgctgatccggaatggacttcgtgaacgtgtaaggattgaaacagacggaaagttgatgagcggaagagatgtggcgatcgcagcgcttctgggagcggaagagtttgggtttgcaacagcgcctcttgtaacactgggatgtgtgatgatgcgtgtatgcaatctggatacctgtccggttggaattgccacacagaatccaaaacttcggaaacgttttcagggaaaaccggaatatgtagaaaactttatgcggtttgtagcgcaggaactccgggaatatatggcaaaactgggagtacgtacgctggatgaaatggtaggaagaaccgatctgttaaagcaaaatgagacaaagcagttccggatggcagacaagatggatctcagtgagatcctgtatcatccggcaaaagaaaatgtgacttttcaggaaggaaaagcctacgattttcagttggaaaaaacgctggatgaaaaggtgctgttaaagaaattgaaaagtgcagtggaaaaaggaacgaaagcagtgctggaaacagaagtaaaaaatattgatcgttctgcaggtacgatcctgggatccgagattacaagattccacagagaagggctgccggaagacacgatcgtgatccatgcaaagggtgtcggcggacagagtttcggtgcatttattccaaaaggaatgacgatgacactctgcggagacagtaatgactatttcggaaaaggtctctccggcggaaagctggttgtttatccgccaaagaacagaggatatcaggcagaagaaaacatcattgtcggaaatgtagcactttacggagcaacggcaggaaaggcattcatcaatggagtggcaggagagcgatttgcagttcgtaattccggcgcttatgcagtggtggaaggtgtcggggagcacggctgtgaatatatgactggcgggcgcgtggttgttctcgggaaaacaggaaagaactttgcggcaggaatgagtggggggattgcctatgttctggatgagaacagtcatctttaccgcaacctgaataaagcaatggttgcaattgaaaaggtggagaataagtatgatgttcaggagcttcgtactatgatcgaggaacatgtggaaaatacgggttctgcacgtggaaaagaaatcctggaagattttgatgcctatctgccgaaatttaaaaagattattcctcatgattataagaagatgatcgcactggcttccaagtgggaagagcgggggatgagcagcgaacaggcacagatggaagcctttcatgagagttttcagagaaaagaaagtgaggtatagaaacgatgggaaaaccaacaggatttttagaatacgaaagaaaaaatacaaaggcagaaacaccgcttcagagaattcaacattttcatgaattcaaaacttcactgcctgcaaaagaacagcaaaaacagggaggacgctgtatggactgtggggtgccgttctgccagaacggtggtctgctcgcagggatgacatcggggtgtccactccacaatctggttccggaaaccaatgatctgatctatcgcggcaactggaaacaggcgtacgaacgtctggagaaaacgcactgttttccggaatttacagggagagtctgcccggcgctctgcgaagcggcatgtacctgtgcactccatggagatccggttgcgatcaaggacaatgagaaaatgatcattgagtatgccttccagaatggctgggtgagtgctcagccgccgaaagtacgtaccggaaaaaccgttgcagtgatcggaagcggaccggcaggtcttgcagcagcatatcttctgaacagaagagggcatcaggtgacggtatttgagcgcagcgacagagtcggaggactgctgtgttatggaatcccgaatatgaaactggaaaagcggatagtggagagaaggatccggctgatggaagaagaaggtgtgctttttaaaaccggagtagatgtaggaaaagatgtgacggcagctgaacttcagaagcggtttgaccggatcattttagcctgtggagcctcaaatccaagagacatagaagtaccgggaagagacagtaaaaatatttattttgctgttgattttctttcttctgtcacaaaaagtcttctggatcacaacttgaaggaaggcacatttatcccggcaaaaggaaagcatgtgctggtgatcggaggcggtgacaccggaaatgactgtgtgggaacggccatcagattgggagcaaaatcggtgacacagttggagatgatgccgaagccgtctaaagagcggaccgcttccaatccatggccgcagtggccgcgtacagaaaaaacggattatggtcaggaagagtccattgccgtttttggaaaagatccgagagtgtatcagacaacggtaaaggaattccagaaggacaagaatggaaatgtaaaaaaggcagttttgatccaactggagccgcaaaaagatacaaaaacaggcagaatgcagatggttccggttccgggaagtgaaaagacgatcgatgtcggtctggtgctgatcgcggcaggatttcttggaagtcagaaatatgtgacagatgcatttggtgtttccgtagatgacagaaccaatgtggcagccctggaaacaacttatgagaccagtgtacccggggtatttgctgccggagatatgcgcagaggccagtctttggttgtatgggcaatccaggaaggaaagcaggtggcaaaggcagtagactgttctctgatggggtacacaaatctgtaagatagaattataataaggtcagaatgtaagacaaggagaggatgttatggagaaggatagaaaaacagaaattttacagatcgtagaggaagaaggagtggaatttatccgtctgcagtttacggatatgttcggaacattaaaaaatattgctgttccggtcagctgcctgaaagaagcgatggatgacagttgtacgattgatctggcgtccctgaacgggtttgccaaagatgaggagacgcagctgtatctcaaaccggatttttccacgtttacgatactgccatggcgtcctcaaaacggaaaagtcgctcgttttctgtgtgatgtatgcaatgaagatggggaagaatatgagttgagtccgcgtctgatcttaaaacgtgcactggaaaaagcagaagagatgggatacacactggaagtgaatccagagtgtgagttctttttgtttcatacagatgatgatgggatgccgacaacggtttcccatgaaaaagcaggatatctggatacatctccaatcgatttgggagagaacacgaggcgggatattattttgacattggaggaaatgggatatcagatcgcatcctctcaccatgagattgctccggcacagcatgaaatagactttacatttgaggatgccctttctacggcagacaagatgatgacttttaaaatggcagtccgtaccattgcaaaacgctatgggctgcacgcaacgtttatgccaaaaccaagacaggatgtgaacggttccggtctgcacctgcacatgcgtctgcttaaaaacggaagaaacctttttacggacgaggcaggaaaattaagtgcggacggagaagcattccttacaggggttctggagcatatcgtgggaatgacagccattgccaatccattggtcaactcctataagcgtctggttccgggattcgaggcgccttctgatgtgacctggtccaaaacacagaggaatgcgcttctctacgttcgaaaacgcagaaaagaaggcatagacctggaacttcgaagtccggactgtgcggcaaacccatatcttttactggcgctttgtctggaagcaggtctggacggcctgaaaaaacagaagaaagctccggcagaactgaccgaagacatccgaagactgtcctgtgaagaaaaaagacagcgtggaatccagagtctgcctgagaatctgggtgtggcactggatgcgatgggcaaagatcctctgattcgggaagtcctgggagaagcttatgtgaaagaatatcagaaaatgaaacgcagagaatggaaggactatctggaacaggtgacaaaatgggaactggagcagtatctgtatctggtttaggaaaattagtggaggccgcagatgggagtcattgttgttgtactaccgaatcttgagaatgcgaaaaaagtgaaaaaaatactgatggaacacggatttcagacggtgtttgcgtgttcttctgccgctgcggctctccagatggtgaatgaatatccgtatggtcttgttatcagcggttaccggatgcccgatatgtattatctggatctggtggattgtctgccccggaattttgaatctgtgcttgtgggatcggaagagacggtagcacgggcgggtgccgggatgttgtcattgactatgccggtaaaagcgtatgatctggtcaatactgcgaatatggtacttggtcaattggagcgaagggtgcaaaagaaaccaaaagctccccaaaaacgaagtgagaaggaagaaaattatattcgcaatgcaaaatttctgctgatggagcgcaattatctgacagaagatgaggctcataaatatttgcagaagtgcagtatggataatggaaccaatatagtagaaacagcacagatgattctgacgctgttgtttgatgagacataactgaaaagtaggaaggaaaaacaatgccgaatttaaatgaaaattatttgaaactgcaggaaaactatcttttttcggaaattgcacatcgtgtggcagagtatacaaaacagaatccggaaaaagaagtcatccgcctgggaatcggagatgtgacccgtccattgtgtgaatgtgcgggagaggcgctgcttgaaggtgcaggggagatgatgtcagcagacacattcaaaggctatggaccggaacagggatatgccgatacaagaaacgcaattgtggattactacaaaagaagcggtgtggatgtggatgcctctgcggttttcatatcagatggtgccaagagtgacaccggaaatattaccgatctgtttgcgcatgacaatgtgatcctgatcccgacaccggtgtatccggtctatgtagattcgaatgtgatgtgcgggaaccagatccaatatattcagggaaatgcagacaacgacttccttccgatgccggactgggatcagcatgcagatatcatctatatctgctctccaaacaatccgaccggtgcatgttataacaaagaacagttaaaagaatgggtggattatgccagaaagaatcaggcagtgattctttttgatgcggcgtatgaagcttttatatcagatccggaactgccgagaagtatctatgctgttgaaggtgcgaaacagtgcgccattgagttctgttctctttccaaaactgccggatttaccgggacacgatgtggctataccattgttccgaaagaacttgtatttatggcatccaccggagaagaaatgtctttgaatgcaatgtggaacagaagacagtgtacaaaatataacggaacttcttatattgtacagaaggcggctgcagctgtatttcgtgaggaaggaatcagacagtgcagggaaaatttggaatactaccggacgaatgcgcgtgtgatcacagagacgctgaccgatcttgggattcgtttttatggtggtgtacattccccgtatgtgtggtttgagtgcccgaacgggatggattcctggacattttttgatgagcttttagaaaagatccaggtagttggaacccctggagccggttttggtgagaatggaaaacggtacttccgactgacatcgttcggcacacatgagagtacgcaggaggcgatgaaacgcttccggtcattatttcagacagtataaaaatggaacagatggttctccgatcagagaagttttctttctaaaaaaaacatgaagtttatgacagtcagagtcaaatatggtatactgataatgactaaatgagaagggagattttccaaattgagaggagaacaccagatggaagatgcgatcaaaaattacgaagatgtggatagttggaagaccgtcattttcttatataacgcagcattgaaagaagtaggaacaaagctggagatcctcaatgatgagttccagcatgtacataaatataatccgatcgagcatatcaagacaaggatcaagacaccggagagtatcgtaaaaaagctgaagcgatacggatatgagacttcaattgagaatatgctccggtatatcaatgatattgcgggggtgcgtctgatctgttcttttacgtcagacatttaccgccttgcagagatgattgggaatcagacagatctgaaagtactcgcgatcaaggattacatcaaaaagccgaaagagagtggatacaagagctatcatatgctcgtatctgtgccgatttttctttcggacagtgtggtagataccaaggtggagattcagatccgtaccattgctatggatttctgggccagtctggaacataagatctactataagtttgaaggggacgcaccggattatatcagccgtgagctgcaggagtgtgcacagatggtatctgagctggacgacaagatgctatcgttgaacgaggcgatacaggcgtgtctggaagtggagaacggtacatcgtcacaggcagaaccggcagagaagaagccggaagaggaaaaaaggcaggaagatatcgtagaacatattttaggaagagaatcatagagaaagaatagccaaagctgcaccgatttctgcagatttggctgttttttttatattggatgaaagtttggtttcatattttgaaaagtttccaatggtaaggatatcttttgttttttcaaagggatagattcccatcaaatcatcactgtaataagtatgtaaatgataatctgcgtatataaagaactcctttcgttaagtaccgtctgttatttttgagtctgttttaacattttttcgtgcattacgaacataagaaccaggatcaaaagcagatatatcgggaataaggctgggctgaacgtatttgcgatccatccaaatacaggcggcatcaggcaggtcccgacataagcagaggccatctgtatgccaatcattgcctgagagcggtgtgcgccaaaatgttccggtgtggagtggatgatgcacggataaatgggggcacaaccaaggccgatgcagatcagtccgaagagggcggtgatttctccgattggcagaagcaggaaaagaatgccggatgcgataaatccctggccgatccgtatcatttgtgtgtcgttgaatcgcatcgttaaaaatccgctgagagcccgtcctgctgtgattccgataaaaaataagctggcaaatccggcagcattttctgaagaaattccccagtgtaaaacaagataactacttgcccacagtccggcggtctgttccagagcacaatagcagaaaaatgcgatcatgatttcttttgctcctgagatacgaatgatctgtgtaagagaaagggcttgcccatctgaggatcccgcagcatcgctgcagtttgccggcttatcggatcgtttccaaagcggaaggctcaacacaagcaccgctgtcagaaaaatttgaagaatggaaatataacggtatcccatattccagttctgaccgtctgagagggcgtatcccataatatacggcccaagagaggcgccaatcccccacatgcagtgcagccagctcatatgtcggcttgtataatgaagtgcaacataattgttgagtgcggcatctacacatccggctccaagtccatagggaactgcccacaggcacagagcggcaaatgtatgacttacggaaaatccaaataatgcagcggcagtcatgaaaacgctgacagcggtaatcgtgcctgctccgaatcgtctggtcagccggtcgctcaacagactggaaatgatcgtgccgaccgcaatgatcatggaaataccccctgcataggaaaccggaacagaaaattcacgatacatagtgggccaggctgaccccaaaagagaatccggcaatccaagactgatgaatgccagataaataacagctaatagtaattgaaacatacagaacctcctatcaatgttctgatataatcatatcgacataatgagattaatgcaacttcatttccggtaggaagaatttggaatgagatttgtggcaaggataattctgcttttaccagaaaaaagttagtaaacaaaagaatggtttactaaactaaaaaagaacaggtggtaaactaaaaacaaaagtaaactagatatcataatgattagttgtatctaaaatgataaatttatagtcataatgcataaaaataaggtgtgttattcgtagaaaaattacaaaaacgaggaatgtgtaaaagaaatgtttgactttaggtaaaactggtttataatcaaattatagttaaccggttactaaaggcgagatcagtaagacaaaagaaaaaaaggaaggaaaaggagaaggcaaatgattggaattatcgttgcaggacacggaaattttccgacagggattctgagtgcagttagtctgattgcaggagaacctgagcatgtaaaagcagtggattttgtaaaagggatgtcttcacaggagttaaagcagcagatggaagaacagatggaggctttgggaacttcagagattctggtcatgacagatctgcttggcggaactccgtttaatgtggcatccggcatgaaagcagagagtgagaagacgatcaaagtattggcaggtacgaatctggcaatggcagtagaggcgatcttctccagagatctgatgggactggaagaactggcggcagccatcaaacagagtgcaaaagatggtgtggaagattttgacagtctgggaaatgatgaagagatgatttttgaagatggtgtctgatcacaaagaggagaatcatgattaagaagataaacattgaagatattaaaaaacgggaagaattcctttcgggtaaactgttgacccgcgaagaagtggaatgtgcactggaagaggcaaaggcttctgtcaaaagaaatatggaatacttaaatgggaagtttccattttcggcggcatataattccgagccatttccgtcagaaagagacgggatgtatcccatcacagaaaacgtagaatggacaaccggattctggacgggtctgatctggctgatgtatgactggagcagggaagaatgcttcaaggagcggggaatggcagatgtcagatcttttaaagagcgtgtagatcagcggatcgatttgaatcaccatgatcttggatttctctacacaccttcctgcgtatctgcatatcagttatgtcagtcagaagaggcgaaggaagcagctcttcaggcagccgatattctgatggagcgctacagagaaacgggacacttcattcaggcatggggaaatgtaggagatccgaaagactatcgtctgatcattgactgtatgctgaacattccattgctgtactggaagagcagagtgacaggggatcagaaatatgaaaatgcggcaagagaacattttatcacttcctgcaacaatgtagtacgggatgatgcatcggcgtatcataccttttactttgatccggagactggagcgccggtcaaaggtgtgacacgtcagggctattcagatgattctgcctgggcgagaggacaggcctggggaatttacggaatcgcattgaattacagaaactctggaatcgaggaagcgtttgacctgtttaaaggaatgacgaattacttcttaaatcgtctgccacaggacaatgtctgctactgggatctgatcttcggagatggttccggacagtccagagattcttccgcagccgctgttgcagtctgtggtatgcaggagatgtgcaaatatctgccggagacagatgaagacaaagaagtttacaaatatgcgatgcacacgatcttacgttctctgatcgagaattatgcaaaccatacacataagccgggagaggcgcttctgcttcatggagtttattcctggcattcaggaaagggaatcgatgtagggaatatctggggagattattattatgtagaagctctggtacggttcttaaaagactggcaggtatggtggtagaagacaagagttcaaatataggaggataaaaacgatgacagataaaccaaatattgcggcactgcgcattgatgagcgtcttgtacacgggcagggacagctctggattaaaacactgggagtaaataccgtaattgttgcaaatgacgaagcagcaaacgatccgatccagcagacactgatgaaaacagtgattccgaaaacaattgcaatgagattctttacagtacagcatacatgtgatgtaatctataaggcttctccaaagcaggtgatgttcatcatctgtaaatcagcagaagatgcgctgaaactggttgaaggtggtgttccggtgacggagatcaatgtgggaaatattcacagagcgccgggaaaacaggaggtcagcccgtacattgcacttggagaagaggacaaagcagcgctgcggacattaaaagaaaaatacaacattacatttaatacaaaatcaacaccgacaggtgcggatacagcatccaatgtggatcttacgaaatatttataggaaaaaacatctataggaggaagagaaatggaaattacaattgtacaggccgttctgatcggactttggacaggcgtgtgtctcagcggtatgcttttggggatttatacaaaccgctgtctgatcatggctacaggagtgggactgatcctgggagatctgccgacaggactggcaatgggagcagtcggagagctggcgtttatgggatttggagtttcccagggaggaagcgtgcctccaaacccgatgggacctggaatcatcggaagtatcatggcaattacaatgaaaggtgcaggggttgacgtggcaacagctctggcattgtccttcccgtttgcagtggcattccagtttgtgatcacactggtttacacaggaatggccggagtcagcgcagcggcaacaaaagcactggacaataaacagtttaaaaaattcagactttgctgtaatctcaccgtttgggttttcctcgtgcttggctttgtgatcggatttgcaggtgcaatgagtgcagagggtctggaaaaagtaatcagtttgatcccggcatggctcaatacaggattgagcgtagcaggagcaatgcttccagcaatcggatttgcaatgatcttaaacgtcatggcaaagaaggagctgattccgtttgtactgcttggatactgtgcgatcgcatactttaaacttccgatcatcggagttgcgatccttggaacaacagttgcacttttggttcatttctatacaggaaaaggaaacaaatcaggtacagaaacagaagaagtggaggtagaatttgaagatggcatctaataaattacagaaaaaagattatacaaaggcgtcgctgagagcatacttccttcagaatggtatgaactacagcaactatcagggacttggatatgcgaatatgctgtatccgggactgcgtaaaatttatgatgatgatgaccagttaagggatgcattgaaagaaaacgtggaattcttcaatacaaacccaagtatggtaccattcatcggaaaccttcatcttgcgatgcttgatggcggagccaatgcaaaagaagtaaaatctattaaaatggcattgatgggaccaatggcaggaatcggagattcattgtctcagttctgtctggcaccgctgtttgcgacaatcggtgcgtcgcttgcacaggatggactgatcctgggaccggcgattttcttccttggaatgaatatcacgcttctgattattaagttgttaatgggaaattggggacataagcttggagcaagtatcattgaaaaactgagcagttatatggaacagatctctacgattgcaggaatgatcggtgttacggtaatttccggtctggcagtcaatttcgttaagatctctacaaaacttcagtatgtggcacaggtttctgcgacagaagaaaaaatcatttctctgcaggaaatgttggacgccatgctgccgaatatgttggcagtcttgtatacaggtctgatgttctacctgatcaaaaagaaaaaatggagtacatacaaactggtaatctttacgatcattgtgggaattctgctttcagtggttggaatactcggataagaaaaatgtacaggactatgggatgtttagtatcataaacatcccataactggtttctaccaaaatggaggttcaaatatgagttcgaagatggaacgattaaaaatacgggcacaggagtatcggaacgggtatcgtgcagaagaagtcaaaaaagagatacatcaggcagagatgcaagaaatcctctgtcaggcagactggcttctggaacggaaattttgcttttgtgatcggtgggatatggagccgtgcagtacagtctatgaggtatctccgtttgcatgggatgcctgccccaatggagatccggagtggatctatatgctcaatcgacaggaatatttgaaaaaactgctgatggcatattggtataccggtcaggaaaaatatgtagatggtatgaaagcatacatactggactgggtgcgaaaaaatccagaagaaacatttggttctttgatgacaagaacaatcgatacaggaatccgctgcgctgcatggactccattggttttacatctgttggccatggaaaaactgacggaagaagaactgaatgagatcataacaagtatggagcagcagtttctttatctgtatcagagttatgtgccgaaatatcggcagagtaactggggagtgctgcagacaacttctattttgcagaatggagcgtggtttggagaatattttggttcggataggatgcaagaaattctggcctgggcacaaaaggaattgctctgtcagctggaatcccagatctatgcagatggttctcactgggaacagtcgatgatgtatcatatagaagtactcaactcagtgactgtgatgttgatctccagaaaacgggcgggagtcaggacgccaaaaaaagtagaagaaatcttatatgggatgtatgattatgtcatgcatgcagcgggaccggatcatcttcagatcgcgcagggagacagtgatgtgacggatattcgggacgtgatgacaagaggtgcgctgctgtttgaagaaggcgcttttaagaatgccggatatgaagtgccggatttggagagcatctggtattttggaatggaacaggaagaccggtatttgaacttaaaggcagaagagccaaaagttctgcatggactttacccggacagtggaaatttttattatagaagtgactggcaggaagagagcgatttcacctatcttcacaatgggccgcttggaagttcccacggacattctgaactgacgcatatatgcaactattttaaaggaaaagcatttctgacagacagtggacgctattcttatatagaaggagaattgcgaaacaggctgaaatcaccggaggcacacaatgtttccgtgatcaaggggtgtccgatgggagtgccggatggttcctggagttatgcatactttgcagacagtttgaacaattactggaaaacaatggaggggatccattatgtagagatgccatatgtgatgaaaaatgaacaaaatgtaccggcatattgctgcagaagggttatgatttttccggagggaatctggctgatcagtgatgatctgcgtatggcaggaaaacaggaaagtacgatgtattttcatctggcaccggaggtgtctgtcgtaaaacaatcccaacgatcggctgttctggagcatggaggagcgagactggtgctcacagcagaaggaaatctggagcaaacgcgtgagattttatccaggatctacaatgaaaatgaagaacatacagtgtttcagacaacaacggaatgggaaaacgagggcatatgtaccgcatggatgcatccggagaatgtggagctgaaagatgcagtgatcacacaggcagaaggcggtcaggcagatgcttcggtagcagcaaaagaagtgtgggtttccggaaagctttcgtatgtgatcgttgtccgtgcacatgaaaattaccgtggccggaaagttttcctataccagaattgtagcttttatggtaaagtagttatattgaagaaaacagaagaagggtttgaagtactccgcttccgggcgtagaacgaaaataaggtgggaaacaagatgaaaaaactgaccattaatgaaattgcagaaatggtaggagtttcgaagacaacgatttctttttatttgaacggaaaaacgaataaaatgtcagatgagacacagaaaaagattcagcaggtcattgaagagaccggttacacgccaagcgctgcaaccagaaccgtaaaggcaagcgatgactgtatcggcgtgattcttggagatgtgtccaaaccatttgcggcaaaggcactgaaaggaattgaagaagaagcacatgaggccggatatcaggtgatcgtgggaagtaacgagatgtcatttgccaaagaaaaagaatatgtagagcatatgctgaaaatgggagtgtccggttttatcatacaggcaacatacaggtttggaattttggcaatggaattggaaaaaaagaataaaaaggttgtatatctggatattccaccttatgattcacagggagtaagaattctgggggacaattatcaatgtgtgtatgatacgatcagtcagtgtattggtcgggggtatgatcagctcttggtcgtatccgatgccaatgaatctgagtatacgggaatggataatctgcggggatttaaggatgcggcgaatgatgcgggaatttcattcaaaacgtattttattgaggcagagacgacccgggaagagattcaggaatatcttgcgcagcatatcagcgaatataagaaaacactggtgtatgcttcggatgtggaagcgcttcggaaagtatatctgggaattaagctgttccctgattttttgtcgctgttcccggaacgtctggggctgatcggatttgatgtgaccggctggacgaagattgcagtgccggagatcacatcgatcatgattccggcatatcaggaaggaaagattgcttcgcaaaaactgattgagatgatcgaaagcaagaatagcatttcgaataagaagattgtgataaaaaatgcagtgcgctggagggacagcacactgtagcaggaggaagaaaagatgatacagattaaattgctggatgcagaaaagaatattgtagaagaagtgcagggagaaaaggaagtcaacctgacactgagaagagaataccaggaaggagattccattctttttgagatccatggagaaatcggacattactggatgcaggtggacgatgctctgggaacatcactggtatatatgacgggagatcaggtgtatgagattccatttgaagagaagaaattcaacctttctccaaaggcatttacaggggaaaaacagctgatctccctgcgtaaagcaagaccatatgaagtgaatatttaccggaatatggcattgaatgtcaatgaccagcacggagatgtgaactgctatccacatgcatctgcaaatgtagagacaaggggagaagccgtgttcgcagcaaagaatgcaattgacggagtgacagcaaatcacagtcatggaaaatggccatttgcatcctggggaatcaatcagagagacgatgcccagatgaagctggagtttggacgtgagatcaagacagacagaatcatactgcatacaagagcggatttcccacatgacaactggtgggtaaaagcaacagttgaattttcagatggaagcagcatggttctggatctggaaaagacagatgtatcacaggagttttcatttgaagagaaaacgatcagctggcttgtgctgaaagaactgatcaaggcagacgatccgtccccattcccggcgctgactcagatcgaagtattcggaacagagtgttaattcaggaggagattctggaattgaaaaatctggcagtgcgcccgcaggctcagcgaagaggctatggcagaaaaatgatcgagtttctctgtgaagaatacaaaggaaagaaaacaattttacaggcaggaaccggagacagtccggctaccctgcctttttatgaagcgtgtggattcacacaatcgcatcgaatcccggcttttttgtggataactatgatcatccgatcatagagtgtggaaaacagctggtggacatggtgtatttgagaaaaaattataagctcttttttccctctctgttcaggatggaagtggactctctccatgcttttggggttactccgctgattttcttaaacaggcgtgtaaagtaatgaatgtctccgattccgcagcgaagagcaatgtctttgatcggtacatctgtattggcaagcagcgtctgtgcatgctcaattcgatagtgattgacatagtctgtcagggacgttcccatttctttggaaaataaagcagacaaataacttgcattgacgccaagatcgcttgccagctggttcagtgtcaggtctgcggaaagatctgtttccagataggcaacgactttccgaatgagcggagagtggatctgatgttgatgctctttgatgatccggcagtatccaagtgcgatcgtctgctgtgcacgcagacactgctgagtggaagtcaggctttccagcatgacaacattgcagttggagtaggcatcaatgtggatgggatgcacgccggcctgttctgctgcttttcgaagcagtgtatttaatgtgatcgtataatttttcatatctcttaaattattggttgttctttgtggaagcagccatgtctcaaatttagaaatcaattccagcgtttggctttctctgccggaagcaacggcattgatcagcatattttctgattcatatcttttttcaatcacatcaatattcgaaaagggatgctcctgatctcgcagacaatgcttataagcattattccaatgatcaaaaaagtcagtattggaataaacgacttcgcaggagtccccgtaaagttttttcccgagttctaaaaacaaactttcaaacagtgcataggaccctaaaaatggaagtctttgataataggtttggatcgcatcgtgataagtttcttttaaaggcagactggaaaataattcttcaaagcgttccccctgcatcttttcaaatacaacaggcccacagtagaagacggttttttcatccggaagcagcaggaaggcaaacgtacattgaaacagatccgtgttaaaatacactttccctggttttagcttctcgaacagatcctgaaaaaactgggaagtgttctttacgccgagaatgtgataacgaagtccctgatccagatgctccagattttcacagggcagtgtaaacttgtaaactggaagatagtttgtctccagtattttttgcgtgaaatcaatcaattcttcgtgtttcatagtgtctcctttttttatctgaaaattgtgcaaaaaactacaaaaatcatcactgttatttttttcaaaatttacatacaataatcatacaacaaatatgtgaaaaagctacgaaaatttgaaaaaaatcggaaagcaaaggagaatggatatgcgcaatgtaatcaatttaaacaaggactgggtatttattcagcagaatgcaggactgccagaggagatgccattagactggcagcgtgtggatcttcctcacacatggaatgctgtggacggacatgatggaaacggcagctatgacagaggaacttactggtatgcaaagacatttgaaacaccgaagcagccgcttggaaatggaaaagtgtatgtggagattctggcagcaggtcagcaggcaacggtgtatgtaaatggaaaagagatgacatatcatgaaggtggatattcgacattccgtgtagatatcacagatgtgtgcagggaagatggggacaatcttctggttgttgcatgcagcaatgagctgaaagacagtgtgtatccacagtcagcagattttacattttatggcggactttacaggggtgtgaatctgatcagtgttccggatgcacattttgatctggagtattatggaggcccgggaatccaggtgactccaagaccatgtgagtgtggcggagcagaatttgagattgtttcttatgtaaaaggagcagatgaaaactttaccgttctgtattccatttgcgatgcagaaggaaatgaagtagcaagcgcttgccgtccggcagatgagacagcagtgaaggtatatgttccagatgcggcactttgggaaatcgatgctccatatctgtacacagtgactgcaagactgcagagaagaaacgagtcttatgatgagatttcagcacgtgttggagtgcgcagcttttcctgtgatccaaataaaggcttcatcatcaatggtgcagagactccgctgcgtggggtaagccgtcatcaggatatgctgtataaaggaaacgcattgacaaaagaagatcattatgaagatgcaagactgatcaaagagctgggagcaaataccattcgactggcacattatcagcattctcaggatttctatgatgcttgtgatgaaatgggatttgttgtatgggcagaaattccgtttatcagtgtgatgaatcaggatccggatgcacaccagaactgtatcagtcagttgaaagagctgatcattcagaattacaatcatccatcgatttgtttctggggtatttccaatgagatcctgatcggaggaatttcagagaaactggtagaaaatcataaagaactcaatgcgcttgcaaaagaactggatccaagccgtctgacaacgatcgcgcatgtatcgatgactccgattgagggaccgatgcatggaatcacagatgtagaaagttacaaccattattttggatggtacggaggcaagatggaagacaatggaccatggatggacaacttccataaagtacatccggaaatctgtctgggactttctgaatatggatgtgaagggatcattacttatcacggcccgaatccggcatgcaaggattacagcgaggagtatcaggcactgtatcatgaacatatggcaaagatgcttgaggagcgtccatggatctggtccagtcatgtatggaatatgtttgacttcggttgtgcagccagagacgaaggcggcgtagcaggaagaaacaataagggactgatgactcttgaccgcaaggtgaaaaaggacagttactacatctatcaggcatactggaacaaaaaaccaatggtacatctctgtggaaaacggtatgcacagcgtgcaggtgaaacaacagagattcgtgtatattcaaaccagccatctgtgacactgtttttgaatggggaaaaagtagaagaactttctgcagagaaagtatttgtatttacggtggcattgaaagacggatttaatattctgacagcacaggcaggagaggtcaaagatacgatgactctggaaaaagtagaaaaagaaccggagatttatgtattgccggaagtcaatgaacgtgcagaaggcgttgcaaactggttcagtacagttggcgatatggatctgaaagctccgatggagttcccggaaggaatgtacagtatcaaagacagcctggaagaattggcaaaatgtccggaagcaattgaaattgcagccaaagcggtgaaacttacaatgaatatggtagtttctccgggagaaggtatgtgggatatgatgaaaggtatgtctttggaaagacttggagaaatggcaggttctctggcaccggaaggatttatcgaaagtctgaatggaaaactgattcagatcaaaaaggtatgattgaaatctggtgattcatgagacaaacaaggaggaaatgaaaatggggaaaacaaataattccactgtcccggcatttgggatgaaggatagactggggtatatgtttggtgatttcggaaacgatttcaccttcatattgtcctcaatgttcatgatgaaattttatacagatgttatgggcttatcagcgggagttgttggtatgctcatgatggcagcacgctttgtagatgcgtttacggatgttacgatgggacagatcgtagaccgttccaaaccaaccaaagacgggaaattccgcccatggatcaagcgcatgtgcggacctgtggcaattgccagttttctgatctatcagtcaggacttgcagatatgccttatggagtgaaagtagtatatatggttgtaacctatttgttatggggatctattttctatacatccattaacattccatatggttccatggcttctgcaatttcaccggatccgacagacagagcttctttatctacatggcgttctgtaggagcttctctggccagtcttgtgatcggtacgggaactccattggttgcatatgttacggtagatggcaatccagtgctttccggaagccgtatgacgatcattgcaggtgtattctctgtactggcagtcatctgttatctgctttgctacaacctggtacgtgaacgtgtaccggtgccggcaaacaatcagaaactggatattgttgctcttggaaagagtctgatcacaaaccgtgctcttctcggaattattgcggcagcactgcttctgcttctggcaatgctgggtatgcagggaatgtccgcatatgtattcccaaatgtgtatcgaagtacacaggcacagtcggttgtagcattgttgagcaacgtagcgatcatcgcgatctgtgctccgcttgcaagtaagctggcagcaagattcgggaaaaaagagctggctacagtttcctgtctctttggtgcagcaagttatgtggtttgtttgatcgtgcatccggaaaatgtatgggtatatgttgtattttatgtgctgtctttcgttggtcttggatttttcaatacgatcatctgggcaatgatcacagatgtcattgatgatgctgaggtgaaaaacggaattcgggaagatggtaccatttatgcggtgtattctttcgcaagaaaactcggtcaggcattctcttccggtatggtaggaggactgctgtcactggcaggttatacggcagcgactgcttttgagccggctgttacagagagcatctttagaatctcctgtatcgtaccgatcgtaggtttgacagcggttgcacttgctttgatcttcatttatccactgagcaaaaaacgtgtggaagaaaattgtgcagaattggcaagacgcagagaagaaaaataagaaggaatgaaaatagaaggggctgcagtttttatgatggaaaaatcataaaagctgcggcgctttttgttatggagaaattataagaaaaatttaagatttacattgcgttttttttaagccgtccatattatagtttacatagagaaaaggaatgcaggagggatagcatggacagtgaaacgatacttgttgtggatgacaatcaagaaattgtctattcgatcagtgagttactgaaatatgaaggatatcaggtggtaaaagcatatgatgggatggaggctctgaatgctttggagacaaacaacatcgatctgattttattggatgttatgatgccgaggctgaatgggctgtctgcattgatgaaattaagggagaattatcggattccggtgatcatcctgtcagcaaaaacagaggagagtgataaagtatccggacttgttctgggcgcagatgattatgtagaaaaaccatataatccggcggaattgatcgcccgcataaaagcacatctcagacggtatcatgcatggggaggtgcagcgccggaagcagacagtgacaccgttgtaaatggagggcttgtgctggataaaaaaaggcgtatcatacttgtggacgggaaagaagtccggctgaccgccacagagtataaaatcctggaatttctgatggagcatttgggacaggtgttttcctcagaacaaatttatgaaaatgtgtggcaggaatcagcgaattacacggtagaaaatacagtgatggtacatatccggcatatccgggaaaaaattgagatcgatacaaagaaaccaaggtatgtaaaggtggtgtggggcattggctacaaaatggaaaaatatcattgagacagcaaaaaaatggttgaaaaaagaatggaaaatgttgctgagtattattttggcgggaagcgggctgtttgcattttatgttttggttgtttacagaagttatcacccgacgagtgaggcgctcatatttagtgtgagtggaaatttgttgtttggcattggaatggtatatttgttgcagaagggactgcatagaaaatatcaaacctggattccgcagggcgagtcctgctatcaggagtggatgttagaaagcaggaaaatcaacaggattctgctggtgatcggtattgctgcatttgcaatggcaagtgcttttttcctcataatcgtgcagggcagaggagtgagtccctggggatggtactataattatgcggctggatatatgatggtcatcacggttctgatccagtatattttatgtaaagcagtggttcaaagattcgaagagcagaaaatgaacgttttgctgcagaagatggaagagatcaatcaacaaagagttgcagaggctttggaaatcgagaagaaaagtcttgcgaaagtatcgcgcagtgatcagcttcggatcgatctgatcacaaatgtgtcgcatgatctgaaaacacctcttacctccatggtcggttatattgaattgatcaaaaaagaagagttaagtgatcttgtccgggactatgtagaagttcttgcagagcgggccgaaaaattaaaggaaatgatcaacagtttgttttctcttgcgaaagcaagcagtggaaatattgaattgcatccggaaaaattcgaactgaaccggctgatcgatcagatttttgcagatatggaggatcatatgaaaaaaagtgaactacagtttgtaaaacagctgactgaggaacgtacggaactgatctccgataacacgtatttctacagaatctgtcagaacctgatcgagaatgccctgaaatattctgcaaaacatacgagggtatttgtaaaaacatatcgaaaagaaaagcaggatcaactatgccttgagattactaatacggcaggatatccgatggattttacgaaagaggagatcatcgagcgcttttcacgcggagataaggagagaaccagcgaggggaacggactgggactggcaatcgtcagtacttatgtaaaagcactgggaggagcgtttgatattaagatcgactgcgatcagttcaaggcatgtgtggaaatgccatacaacccgaatccatcctccactttttaggagaatccgttgaccggtacctgtttttttcgtataatgaaaatcaatcgggatcttaaaaagcaagaacctgagtacgctgtttagaggaccggaagggagaaagaacatgacaagatcagaagcagaacattgtgatttgctgcattttcatagcgatacagtccgggagatacaggaaaagatgccggatgagcaggaaatcagagagctggcagatttctttaaagtatttgcagatgccacaaggcttcggattctgtgtgtgctgtcctgttcagagatgtgtgtctgtgatctggcatatgcactgaatatgacgcagtcggcaatttctcatcagctccggcttctgaagcaaatgaaattggtagtcaatcgaagagaggggaagactgtgttttattccctggcagatggtcatattaagacgatcatgaagcagggaatggaacatatcagggaatcgatatgaaaagagaagtaaaaagaaggagtatagaatgcgcggcagcgacagttttgtatatcattgcaattgcaggaagtttttatgcgcagccagaggggagaatgcggcttgtgatttttttgcttccatattccattatggcgtttgaaacggtaaggcttctttgggatcatttgaaaaaaagaaaactgtttgatgagaatctgttgatcctgcttgctacattgggagcatttgctgtacatcgatattcagaagctgtgggagcgatgttatttttccaaataggaaaattactggagcttgtttctatgagcagaaccagaaagtctattgaaaaatttatggacatccgcccccagtatgccaacttaaagatcagtggcggtgagatgcaggtgccgccggaagagctgagtccgcgtcagatcattatcatcaagccgggggagaggattccggtggatgcagttgtgacacagggaagcagtacgttggatacgaaggcgctgaccggagaggcagaaccaagatatgtgaaaatcggcagtcagatttacagcggaagcatcaatctgagcggtgttctggaggcaagggtgctgaaggcatcggcagattctacagcttcgcgtatcattgatatgatttccaatgcagataacagaagagcacagacggagaatttcgcagaaaagtttacccggtattatacaccgttagtaacactgttcggtattctggtgatgctgcttccgccgatgatgctggaagggacagatcaggggatgtggatctatcgaggtctgatctttttggttgctgcatcgccgtgtggacttttggtatcggtaccgctggcgtttttgggcgggatcggtgctgcatccagacagggagtgctcatcaagggcagcaattttctggaggcattgtcaaagacagagacattcgtatttgataagacaggaactctgacggaaggggtattccgtgtaaaagaagtgtgtccaaagtctatgactgcggaagagctgctggaactgactgcatatggagaggcctattccagccatccgatttccggatctttaagagaagcttatggaaagccgatcgatcaggcacggatccagtctgtcaaagaatttccaggggttggcctgcaggcagttgtagatggaaaacagctggagattgggaattctaagtttatgaatcagcaagggtatttttataaacgggtgtcggatatcggaacggctgttcatgtggcagtggatggagaatatgcgggttatattctgatcacggatgttgtcagaaaagaggcgggacgactgcttcgatggctgaaaaagcagcagatcgaggctgtcatggtaaccggagataatgaacgggtagccgaagacgtagcccgccagttaaaaatggattatgtatatgcggggctgatgccggaagaaaaggtcgagcaggtcaaagaatttatggaaagccatatggaaggtgagaaactggcgtttgtaggggatggaatcaatgacgcgccggttcttgcacatgcagatatcggaattgccatgggagggctgggatcagatgcggctctggaggcggcagatatcattttgatggaagacgatctttccagaatcatcaatgcaatccggatttccagggggacgatccgtgcggtgaagcagaatctgatctttgcaatcggtatgaaagtatttcttctgttattggcttcttttggctatgtaacaatgaaaaatgcaattttagcggatatggcagtgatgatgatcaatttactgaattcgttctgggtgctgaaatatccggaataggggagtagaaacatgaaaagaggaatcgtagttacattggcagtgtccatgtgtcttttgacgggatgttccaatgcactgaaatcagggactgtatccctggaagagggaaattatacagaagcagtgtcatcctttgaaaaagcggtatcagaaggcaaaaagacggcagaagcataccgcgggctggggatggcatattatgaacaggaagactacgcatctgcaaaagacgctttcgaaaaagcgttgtctgcaggcggagagaagaatcaggtgatttataatttgcttggaatctgtgggatgaagctggaagattaccagtacgcattggaacagtttacacagggaatcagtctctcgcagaacagcggaacgtccatggaggatgcagagagtttcagtgaagtacttcaggagatgttgttcaatcaaatcgtatgttatgaaaagctgagtgactgggaaaatgcgaagtctaagatcgcagaatacattcaggtatacccggacgatgcggatgcacagcgggaggcaatatttttgcagagcagatagaaaatgtacataaaaacaggatacgctgactgtggagaagtttctgtggtcagcgttctttatttcagagaaggaaaggagattggatgaaggaatatcagattacggaattttgtcatcggatgataagagaacatatcagggaaggagactgctgtatagatgccacagcgggaaatggcaatgacacagaatttttatgtcgcatggcaggtgcagcagggaaggtgtatgcatttgatattcaaaaggatgcgatagagcatactcaaaaacgtctgaaggaagtcggtttgctggaacgggcagaggtgattctggatggacatgagcatatggaagaacatgtgaaggaaacggtatccgcgatcacgtttaatttcggataccttccaggtggtgatcatcagatcgcaacccgggcagatacaagcattcaggctattgaggcaggacttcgtctgttgaaaaagggcggaatcatgagcctttgtatttatagtgggggcgacagtggatttgaggagaaagaggcgctgctgtcttatttgaagacactggatcccagaacatttttagtgattgtaagtacctattataatcgggaaaatcatccgccaatcccggcgtttgtgatccggacaagagaagagaggagggcgtagatgggattttcaatggatgtgggtgttcctgtactgactgtgtttctgcagggacttttgagctttttttcaccatgtgtgcttccgcttgtaccgctttatctgggctatctttcagggggtgccaatgaggaaggattatacggaaaacggggaacattgtttttcaatacgatctgttttgtgatcgggatcagttccgctttttttatgatggggcttggtgtgtcagcagccggaagctttctcaataagaatcaggcaatggtggcaagaatcggaggaattctggtcatcttattcggattgtaccagatcgggatttttggaaaatccaaactccttggtacagaacacagattctggctgcagcttgacaaattgaagatgtcaccgatcgtagcactgatatttggatttacgtttagctttgcgtggactccatgtgtgggtccggccctggcaagcgtgcttttgatggcgggaagcgcagagacaaagctgacaggatttcttttgatcggagtgtatacacttggatttatccttccgtttctggcggtaggactgtttacggcaacggtgctcgaatttttcaaaaagcataatcatgtagtcaaatatacggtgaagatcgggggcgctctgatgatctttatgggaattctgatgtttacaggcaagatgaatgccattaccggatatttgtcaggaacacagaccatttcaaaagagacggagagaaaagagacaaaagaagagacagatgaggatacgaaggcagaagataagcaggaaatatatccggcatctgattttgtcctgaaggatcagtatggaaatgcacatagtctggcagactataaaggcaagaccatttttctgaatttctgggcaacctggtgtggtccgtgcagaaatgagatgccggagattcagaagatttatgaagaaacacagcaggaagaagacagcgatctggtggtcctgggaattgctgcaccgggactcgggaaggaaggcagccaggaggagatcgagacatttcttgaagaaaatggatacacctatccagtgctgatggataccacaggagaggtatttatggagtatgggatcagcgcctatccaacgacattcatggtagacaaagacggcaatctgtttgggtatattcaggggcagttgaatgaggatatgatgcgcagtattatccggcagacaatggaaggcaagagagagtaggagaagaaatatggcattctatgagatggaagatgcaaaagaacgtgtgattttagtaggtgttcaggaaaacgatgcagagccggaagaggaatcgttagatgagctggcagagctggcatatacggccggggcagaagtggtggggcgtctgatccagaagagagaagcaatgcacccggggacctatatcggaaaaggaaaaattttggaattgaaggagcttctgtgggaaaccgatgccacggggatcatctgtgatgatgagctgacatcggtgcagctgaataatctggaagcagaactggagtgcaagatcgtagaccggacacttctgatcctggacatttttgcgggaagagctgtcagcagagaaggaaagatccaggtagagctggcgcagttgaagtatcgtgcggcaaggctgataggacttcgcaattctctgtcccgcctgggaggcggcatcggaacaagagggccgggagagaagaaactggagatggaccgccgtctgatccgggagcggatcagccgtcttaaaaaagaacttcgggaagtagaagagcacagagaaagactccgtacacagagaaaacgctccaatttaaagctggcggcactggttgggtatacatctgcgggaaaaagcagcctggaaaatgcattgacaggagcaggtgtcttagaagatgcaatgttgttttccactctggatacaacgacacgggtattgaagctggcagatacacaggagatcctgctcagtgatacggtaggatttatccggaagctcccacatcatctcgtggaggcatttaaaagtacactggaagaagcaaaatatgcggatatcatcatccatgtggtagatgcttccaatccccatcaggatacacagatgtatgtagtctatgagacactgcgtcagcttggagcagaaggcaagccggtcattaccgtatttaacaaacaggatcgactggagacgccagggtattttcgagattttcatgcagaatattccattccggtatctgcaaagaccgggcagggactggaggaattaaaagaagcgcttcttgagatccttcggagagatcaggtctatattgaacggctgtattcttttgcagaagccggtaaaattcaaatgatccggacacagggacagctgctatccgaagaatatgtaccggatgggattgaagtgaaggcatatgtgccgaaagaaatctggggaaaagtataagagataagaaaagaatccagaaagccggagagatgaccggaatctggattcttttgagaatgtgaaaagtgtatctgcagttctaaaaaggaggagtaagtttgaatcagacagagagacggcagtttctgatctgggaatcatcaaatatccattctggcagatgacagccaaaaatccgaatgcaaggtatgtctgcatcaatgcctgggaagaagttgaggggagctaggatcatccccacacttctttggcaatttctttcaccagtgcaagcttcgcccactgttcttcttccgttagtttattgccaatctcacaggatgcgaatccgcactgcggacttaagtaaagtcggtccagaggaatatattttgcagcttttgcaattcttttctttatcacttctttttcttctaaaatcggtgacttgctggtcacaagaccaagtacgacttttttatcatcggaaacaaagcggagtggttcaaatcctccggagcgttcatcatcaaattccagataataggcagatacattttcattggcaaaaagaaacggcgcgatcggttcatatccgccggaggatgcccaggtggaatgataatttccgcggcatacgtgggttgtgagcacaagatcttcaggtgcattttccagagcgagattattcagccgcagatatttggctgcctcttcttccagactgacggaatcctctcgtcttgcctcccagtaatttttgtcgcagaacattccccatgtacagtcatcaaactggatatttctgcatcctgcatcgtagagatcccggatgacagtccggtatgcctgtgcaatgtcctgaatcagttcttccagatctggatatacggccagagtctgtgttccattgtcttcccggaagagttctgcaagaagctgggcaggtgcgggaatggtctgtcttgcaatggtatgctcatcttcaaactgtttgacaaatttgaaatgttccacaaaaggatgctgttttccgctgatttttcctgtcacgtggacagagccgtgagtggtttcttccccatggaaaaaatagccgtgatccagttcaatgtgttcgattccctcaagtccccacataaaatccagatgccagtagcttctgcggaattctccgtctgtgatgacagggtatccggcagctttctgctttttgatcagatttgtaattgcttcattttcaatggattctagctcagcctttgtgatctgtccggcttcaaaatcagctcttgcctgttttaagtgtgcaggtcttaaaaaacttccaacataatcaaaacgaaacggtgcgttaaaatttcccatagtaattctcctgttctgtaaattcgtgattctatgggatttattgtagaagagaagaggtgttttgtaaaatatcgaaaataaatagcttgctatagaattaaactatagcaagctcgttgcattttatgaaaatcgtgttttataaataaggagtccccggaacttccggatagcttcccatagagatcagaagctgaagtcccacatctcttgcggtgagcactgcattttttacagcgctggcatctccggtcacggcagcgatgatttcattggaatgactggttccccggtttggagtcatgtatttgatgatctctacaggagaagacttcaatgcaaggtctgccatgacaagaccgatcgcagcaggagaaccgcagaagaatccaaacggctttccgatcggggcgtcaaatgctatgttcagcgcctgggaagcactggcggaataggtgaattccagatgtcctgcttcactgatataaagctcaccggcgtacttttccgtatattccagagcaatctctacggcacggcgcacatcggatacactgtagcctccgatgatgataaagttcccatgaccgccccagcctttggtatctcttggaagctcgatggaaacaatctcggtattggtagatttgactgcttcgtcagccgcattgatctgtccggcagcaccggtacgggaactcaacagtcccagacttttgtaaggcttgtcaatctgcatctgctgaagcagtgcgtcattgacgccagggatcacaagtccgatggtatccagtacggttgtcccgacaaattctgtcatggaacagtccatggatattttttgaatttcgctgatatctaacataatgaaaactcctttatgacatactttcaattaaatataaccgccgtccagaccgatgatctgtccggtcagataagaatgaccggatgcaagagtgagcgccagttcagctacttcttcgctgttggcaaagcggccggcagggatctcttctctcaaggcatctcgttcttcttctgaaaactgtgcattcatggcagtgtcaatgaccccgcaggcaatggcattgacctgcacattgctcggagccagttctttggccagtgctttcgtcagtccgttcataccggccttggtcgcagaataggcggcctcgcaggaggcgccgacggttccccacatggaggaaatattgatgatctttccgcttttctgtgagaccatgtggccgatggcgctgcggcagcagtaaaatacagaagaaagattggtatttaaaatctcggaccactgggcgtcactcatatcctgcaaaagcccgacaaaagaaattccggcattattgaccagtacatccagccccggacagcgcgattcaatgacagagaacatctctcttacctcatcaggatctcccacatttccaggaagcagagtgcaggtgccctgtgcggcaagaatctcctgttccacttcttgcagagcgtccagagaatgacggcagttgagaaatacatgatagtgatttctggcgaaggcaagtgcacaggctcttccaatcccgcgggaggcacctgtgatcagtacatatttctggttcataatctactccatttccagaagaacacctgggaattcttctgactctcaattctgtagttattatacaggaagcagaaacgtttgtataccttatttcgcagaaaatcagggcaggaagcgagggttgcagttgtgattcaaaagcccttgtgctattattttggtagagaaccggtgtgtacatatagcaggaggaaagaatatgatagaggaagcccgaagctttgcagaaaaagcacatgaggggcagttccgcaagggaacgaagcgcccctatattgtacatcctcaggaggtggcgaagattgcagcgaccatgacagatgaggaagagatcatcagcgctgcctggctgcatgatactctggaggattgcaggcaggtcacaaaagagcagatcagggaagcgtttggggaacgggtacttgagctggtagaacaggagagtgaggacaagtccaagacctggacggagagaaaaggggctacgatccggcatttgaaaacagcgccgagagcggtgcagatgatcgcgcttgcggacaagctgtctaatatccgggacattgaccgggagtatccgaaggttggagaagaattctggaaccgctttcgaatgaagagtaaagctgcaatgggctggtattatattggggtgaaagacgcattgcaggaagattttgcaggaattcctgcatatgaagaatataagatgctggtagaaaaaattttcggcagtacatcagactggcaaaggagagaataaaatgaagaagacaaagaccatatgttttgcgaataataagggaggaagcggaaagtccaccacctgttccaatgtaggatatggactgcgggagctcgggtacaaagtacttctgatcgatggggatatgcagctgaacctgtctctatctctgtttgatgaggatcaggtgcttgcatttgcacagagcgagaaaaatttatatgaagggctcaagcgtcaggatgatctgtccggttatattgtacattcggaatatgaagggctggatctgatcccgtcttccacattaatgagttcgatagagtatgaattgtttacgaaatggcagagggagtttattctccgaaaatgtctgacacagatcaaagaatcgggagcgtatgattacattctgatcgacgcgcctccgacgttgggcggatgggttatgaacatcttgtgtgcgtctgatgagatcatcattccggtagaatctacaccatggggcttgttcggtcttggaaatatgtttgaatttctggaggaagtccggcagatcacaccggatctgaaactgggaggaattgtgatcacgaaggtggataccagaaagagttatttcaaacagacattggagactttaaagagtctggaagatgtgcccgtatttgatacctatatccgggtggacagcgggattgaatggtcacaggataataatgcaccgattatggcatataaaaaaagcagccgcagtgcaaaggaatatatggaactgacgaaagaaatcgccagaatggagtaaagacgttatgcacagagaattgttggatgcattgtctgtcattacagaagaagaacagcgcattctggaagagcaaaaggggattgatccacagctttatacagagaaaaaagagtggatcgtggacagtgaaaaactgttaaagaaggggaaactgattcaagtgcgcccacatacccgatttgttaattttccaaagcacagacataattatgtagaggtaatctacatgtgccagggaacaaccactcatattctgaatggaagcagagtggttctggaagaaggcgatctgctgtttttaaatcagaatgtggagcaggagatcctgccggcaggcgaacaggatattgcggttaacttcattgtgttgccggagttttttgatacagcattttctatgatggatatggaggaagaaaatgcattgaaggaatttctggtgggggcattgtgtgggaagagtgacaatacatcctatctttacttccatgttgcagagattcttcccattcagaatctggtggaaaatatggtgtggaccattttctatgatcagccaaacaagagacggtgtaatcagatcaccatggggcttctgcttttacagcttttaaatcatgtggatcgaatggagaccggaactgcagcatttgaccgggaattgaccggaaccgtgtttaactatatcgaagaacattataaaaacggcagtctttccgagttagcggagattatgggatatgatgtgtattggttaagcagggagatcaaaaaacggaccggaaaaacgtacaaggagcttctgcagtcaagaaggatgcggcaggcagcatatctgttgaagaacagcaggcttccggtggcagatattatagagtcagtgggatatgataacagcagttatttttttcgaaaatttaaagaatgttatggagtcagtccgaaggcgtatcgggatagttgagagatgtgacggagcttgtggaatatgcgtatttcagttccgtcacatctcttatttggctgcttattttttctttcctatcatcagatagggttcagtcaggacaggtattttgaaccggcagtatcgtttgctgccatatgacggcatgtattatcagttagagccggttcacgcaccgggaaaagtgttggcaaaatcaggaaccaacgacagaggattttccattctttctttagagacggctatgccgggagctgcaaatcagctgttccgattcgaagaggtgtcaccgggaaatagatatgcaatcatctgtaaagatggaaatctgtctctggatgtgatggactattcgtatgcaaaaggagcagacattatttttacagcccatcagtccaacagtcaggtaaacaaatggtggatcctggaagagtgcagcgaacatggtggatggaaaagaagtgaaagtttcttacacctatgaaaacgaaaaagtgacatccatcggtcacaatggatttacgtatgattatgcgtatgatccgtttggaaatctggaatccgtgtcggttggaggaagagagctggagcgcaccacgcttcgaagccggaacggtcttgcggacaggattacctatgcgacaggggaagccctccgaaatgaatacaatccggaagaacagcttgcggcacagtatctgatcaccgcagacggcagagaagaaaagctgtttgaaaatacgtatgacagctgtggaaaaattgcaaggcataaagatctttgcagtggagtgaccagcacatatcagtatgacttgatcgaaagaatggtaggaacagaccgttctgacggaatgaaacttcgcaaagtgtatgatgagaaaatcgtgtcaaaggatatacgtatcagaaagatcgagttggacatgaggtggaattcctttacggggatgtggaaaaacagcagaaaccggggcttggatatggaatcaagatcaatggcgcccagaagattgcctatgagtatgatgcccttgggcgtgtgatccgtacccacaatcacttctccgatatgaacacatcgactcaggagtgactacaaatctggttgcatctgtccgggaaggaaaccgtgcagaatcctacacctatgatgtgggtggaaatatggtcagccggaaagaatatgattatacggacagttcgatcatcacgggaatgttatgggaaatccgatccagtatcggggaatgcagatggaatgggaacaaggacatcagctgaagcacatcacaggcgctggactggatatgtactgcatgtacaatgacagcggaaagagaatccgaaagatggtcaatggagttacgacagacttttatctggatggttcggccattctgatgcagacgtccagtgacggcagcaggattgatttcttctatgatgataagggcaatgtgtttgctatgaagtatcagaatgagatgtatttctaccgcaaaaatctttttggggatattctgagaattcttgacagtcacggaacggaacttgtaaaatatgaatataattcctggggaaaactgctgaatctgacggattacagttcgaatggactgggcagaaagaatccattccgtttcaagggatactactatgacgaagaactgggaatgtacgatctgaatagtcggtattacgatctggaggttggaaggtttattagtcctgatacgacagatattttagaagtacaggatgatttatatgataaaaacttatatgcttattgtgacaataacccagtgatgaggatagattcaagtggtgcagtatggcatttggcagttggagcagtagtgggtgttgctacacagtttgttgcagatgtaggtattggtttagcgacaggaagttcattcggagaagtgatcagctcattatctctagtggattatgcagccgcagcaataggaggggctatagctgcatctggaatagggtttgctggcgctgtagtggctaatgcaacattaggtggaacaacttatctggcaaattgtagctataaaggggtaaaagcgaataaaaaagattttattgcatctacagtgataggtggagttgcaggagctataggtggtcctggagcgaatggaaaaaatatgcgaggagtatatagtcgctctaaacaggtgattaacgcaaccaaatcggtgaggaagcaggcaatgtataaagcgaaagtaactggaattaaacagaacattacaaaaagtacaggaaaaactgtcttggcaggtattgtgtctaatgtcagcaactttttcagaagatggtttacaaaaagtgatgcgtaggagaaaaatatgagtaagaaatatgatttttgggcgaataaaaagactattccaaatttaaaattgtatacaatattaacgggagtgtggtttggtactctaggcataaattttttgattgtatttttttattggaaatatgtactaaattatgagtttgcaaatttggttttgattctaagcatcataatgtttttgcttgtacctattgctataacggatcccaaaaaagaaagtagggatttgttggctaccgtgtcttatgggatattacatacagtatgtacattagcaagtataataattagtcggtgttggtatttggttggtatttatattttagaattgttcgtggtattaattattttacttaaaagtatccgaagaaaaaagtaaagaattttgccatgaggagttcacaaaaagaggctttaaaaagcgaagaaatatgtggtatttacaggggaaaggtcttttgtgtgggacgtatttgcaaaaatcaatggaagaggcattttatgtagagtatgattttttttcggagatttttcaaatgtgaaaaagtatccgacaacatatgattccgatgtatataggagaataggtgttttgactaaagaggacaaaacgttgactgggttgatagactatgaactatatacacccgatgaactcaggccatattttgataaagcatttgaagagcatattatgccagcgatacattatggaaagtcctacattttgaaagaagcagactattattatcatctttttgcagatgatgaatgggaggaatttttagaaaaattaaaagaagattaggcaaaacacaaaaatgggtaatgggtgagaaaatcgcatttgatgaaggaaaataaaaaggaataaatattatggatcacatttggacgatagaaaattgggaacaaaacattgatttcatggaagaaggtcatcggacgggcttcaggcttcggtttgacagcgggatagatccggaggttcgaagggcatgtaaagagtttgcggcatttttgagaaaggaatatttctttcctctcagagttgttgcctacataaaaaataaaaagaaaatacgggcaatggacggggatctggtatatgggacattctggagtatggaagatgattatacagtggaaccgcatatccgggttgcggcaggagattatttggatttatgcgacagatggggaaaggacagtgcattgacggcgatcttgcttacaatagggcatgagctgacacattattttcagtggatcaacgcattggaattaaccccgatcgggatggagcgtcaggcaacaaagtatgcgagatatgtgttagacgattatgcagaaacaagagagcatccttgagtgaggatcggatgaaaaaaggaaaagaaaaatgagtggcagagtagaacattctttgaaaagaatgccgtctattctgctttttgaattgaaggtggtgaaggatatgaagcaaatggtgacgagcttgtttggaatgtttgggagtgcagttgcccttttatttgtcggatgggatatcgcactgcagacattggttctttttatagcgttttgggataatttaccaagaactggcagcaaggaataaaattgcagatccaaatcggatctgcgttggacaggagatcaggggctggtgatccgcaaaagttgtgatcagaccattatgaattaaattgtgcatattttttcggagaaatccccactgccttggtaaaagccttcaggtagttgctgtaatcgttaaacccgcacgcttcacaagcttcattgacagaatatccctgactcagtaatgatttggagatcgtaatacgttttgcggtgatgtatttgttgatggtcgttcctgtcgtggctttgaagatccggcacagataagaactgcttaggaaaaaatgagcagagagctcttccagagtcagattctcactaatgtgtgtattaatataagaaagaatctcatccacctgggcatggtaaccggatgcttttggttcatcgtctgcagaagcgcggcatcgcttgtcaaacgcacggtttagaaaaaccatcagctccagaaatgtggcgcgatccaggatgtcttccccgaatccggagttggagcgcagtttgtgaataaaatagataaaacgggtttgctcctctgcggagaggtgaagctgatggggcatgtcagttccacggaactgaaaacagtgattcagattggtctgcccggtagaaatctgttttaaatagtccggatcgatcgaaagaatgatgcgttcatgtttctgctgatcgatctgtgtcaggtaatgactttcaaactgattgatcaggaaaatgtccccatcattgatatcatagaaataattgtcgatcagaaactgttttcctccggaaatcgagtaatagatctcatagcagtcgtggatgtgcatatccattgctttttcatcattatataaatgagcaaaagcaaatgtatgtgtgtccatacactgcttcatagattctttgcaggagatacaacctttcatgaaaatctgctcctctcttctgtttgttcaaaatcgtcctgtttttccatattatagttcagaagttcaaaattttcaatatttatagcaagaaaacacaagaaataggggaataatgaatgttatactaagtgcaagaaatgacacagacaagtcagacagattaagggaaattaaaaaacaggaggattatcatggaagtaagaacagcagcatcaccaaaagatgtaaaacactacacaacagacagattaagagaggaatttctgattcaggatttattccaggcagataagatcaatctggtatacagccacattgaccgtatcattacaggagcagcagttccggtcaatgagaaactggttctcacagcaggagatgaacttcgtgcagaatatttccttcagagaagagagcttggaatcatcaatatcggtggagatggaatcatcacaattgacggacgtgtttatgaagtaaatgcaagagacggaatgtatgttggaagaggatccaaagatatttctttcgagagtaaagatgcttctaacccggcaaaattctatatgaacagtgcaccggcacacgtatcttacccaacagtacatatcaaacttgagggagaagcagaagaaggcgttgtgatcgtaaaagatgagaataaggtagaattaggaacactggaagattcgaaccacagaatcatcaataaatacattgtaacaggacaggtagagagctgccagcttgcaatgggactgacaaaacttcttccgggaagtgtatggaacaccatgccgtctcatacacatgacagacgtatggaagtatatctgtactttgacatggatgatgattcattcgtaatgcactacatgggagaaccacaggagacaagacatatcatcatgcacaatgaagaagcagtcatctctccaagctggtctatccactccggatgtggatgcaaagcatacacattcatttggggaatgtgcggagaaaaccaggattacggcgatatggacacaattgcaaacaaagatctcagataatagattttagaatttagaagagaaggagaaacagttatggtaaatttttcactggaaggtaaaattgcactggtcacaggtgcatcttacggaatcggatttggaatcgcttctgcatacgcagaggcaggagcaacaatctgctttaacgatattacacaggaaaaagtagatttaggacttgctgcatacaaagaggccggaatcgaagctcacggatatgtatgtgacgtaacagatgaagcacaggtaaaagcaatggttgcaaagatcaacgaagaagttggaatcattgacatccttgtaaacaatgccggaatcatcatgagaaaaccaatgctggaaatggaagctgatgagttcagaaaagttatcgatgtagacttgaatgcaccgttcatcgtttctaaagcagtgattccgggaatgaaagaaaaaggacacggaaagatcatcaacatctgctctatgatgagtgaacttggacgtgagactgtatctgcatatgcagctgcaaaaggtggactgaaaatgctcacaaagaacatttgttcagaatacggtgagtacaacatccagtgtaatggtatcggacctggatacattgcaacaccacagacagcaccactgcgtgaaattcaggcagacggaagcagacatccattcgatcagtttatcatttccaaaacacctgctgcaagatggggaacaccggaagatcttcagggacctgcagtattccttgcatccgatgcatctgattttgtaaatggacacattctgtacgtagatggtggaatcctggcatacattggaaaacagccataagaaattgaaatataaataatcaagaggagatcaatatgttagtagcagcgagaacacacgactatggaaaacagccggtggatcacctggcaaaactattgaaatccgaaggcattgaggcagcacagcttgtgctgccaaaagcattttcggagatcaattcttatgaggaagtaacgccgcagctggtggaacagattcgtaaaaattttgaagaagaaaacatcaaaatccagattttgggatgttatatggatcttggaaatccagacgatgaagtgcggaaaaatgccgtagatacatttaaaaaatgtctgaaattcaatcagatcctgggagcgtccattgttggaacagaaactgcgtatccgcgtctgagcctggaggaaaagaagatctggcatccttatatgatggacagtgttgccagactggtagaagaggcagagcggcttgatgttgatatggcattggaaccggtctactggcatccgttggaggatctggagacaacggtagaagtgtttgaaaagatgaacagtgatcgtctgaaaatgatctttgatccggcaaacgtgttggaattcccggagattgatcagaatgcttactggaaagaatggctgggagcactgggacacaagatcgaagcaatccatatgaaagattttgtagaaggtccgaacaaagagtattgtccggtctgtcttggtgaaggcgtgatccgatacggggaaatcgtaaaatggatgaagcagcataaaccggatattgtcgttgtcagagaggaactggatccaaagacggcgcagaaggatattgcgtatatgagaaaattgtggatggaataaagatgtgaaaaagaagtttttcggtgattgtatgagaatcattttgaaaaacttctttttttataattgctgttcaatgttctcgaaaatctgccggatggattgccgtcatttttttgataaaaaatagacattatggaaaaatattgctgttgatttttttacattttgctcgaaaaaagtcgaaaatagagagagacagagtgggaaattagaaaaaaatgaattgtgcaatatatacaaaaatataagttttaaattgtttataatacacaaatacagtcggaaagataaaaacagtataaaaaaatgataaaataagcaaaattatgatttgaataaaagaagaatttgtaaaagtgatataaaacaacaagatagtttgaaaaaataagtttgcggacaagaaatgatgagaaaccgactggttcatgtgatactattttcacagaaaaagggcccaaacaaaataaagtctatacacaggagaggaaacatgaagggaatgaaaaaaacaataggaattgttttcgtagttgtgctggcagcaatcgcagtttacacatttgctgccgtaaaaggtgagaccagcagtgaacacgtgcagcttcgaatggcacatggccagtcaggagaatccgagatcggagagacaattgcatatttgtcagatctggttgcggaagatgagtcacagaatctggaagtggatatttatgccagtggtgttctgggatcagaaccggctatggtagaaatggtacaggcaggtgtcctggatatggcaaagatcagtgcaggaacattaggacagtttgatgagagatattctattttctcacttccatacctgttccgtgatcaggatcattactatgatgcaatggcaaacagtgaagaggttcagaagttatttgaatcaacaagagacaaaggttatatcgcaatcggatactatgcaaatggttccagaaacttctatttgaaagaggataagccggttacagatccgtctgtattaaaaggaaagaagatccgtgcgatggtcagcagtgcatctacacagatgatcgacttaatgggaggttctccggtgccaatgtcagcaagtgagacttatacatctcttcagcaggggattgttgacggtgcagagaatacagagcttgcattgactgtagataagcatgaggaaatcgtaaaatcttatacatatacagagcatcagtacacacctgatatctatatcatcagtacaaaggtatgggataagctcagtgaagaacagcaggactacctgaaagaatgttttgtgaaattaaatgaaaattttgttgcaaaatacaatcagatgatggatgaagcaatcgaagaagcagaaagctatggagtaacggtttaccgcgatatcgataagacagaatttattgaagctgtacagccaatgcataaagcatatgaaagcaagggcgatgcatatgaggtattatatcaggatattcagaaatatggaaaaacaagcgcgaaggaggataaataagaatgaaagttatcaataaaatccttggaagtgcaatcgcagcactggctgccattatggtactggcttgctgctggcaggtaatctcccgctttattttacatgatccaagccagtggacagaagaattcttaagatatgctctgatctggatgacaatgcttggtgcaccgtatgcatacggaaaagatcagcatctggcaatccgcgtgctgacagataaattccagccgaaaaaccaggtcattacaaaaattgccattgaagtgatcgtattgatcttaagtgtatctgtatttatcgttggaggaatcatggtaactgcaaactctgcaggtcagatttcaccggcattgcagcttccaatgcagatttattatgtttgtattccaatctgcggatgccttatggttttatattgtattgaacgtttaggaaaatggatcaaagaattaaaggaggggaaataaatggaaattcaggcggcgatcttgctggtcatcattttcttcctgatgctggcatttagtgtaccggtatcttacagtattattatttcagcacttgtaacgatagttgcattcttgacacctggattcggtgtgtttgtttctgcacagaagatggtcagcggtattgacagtttctcactgatcgcggttccgttctttattctggcaggacttttgatgagcagtggaggtattgcaagaagactggtgaatcttgcacttttagttctcggaaaagtaccgggatctctggcactgacaaatgctgccggtaatgcaatgttcggttctatctctggttccggtattgcggcagcaactgcaattggtggagttatgctccctcttgaaaaagaacatggatatgatgaaggattttcagcagcagtgaatattgcgacagctccggttggacagctgatcccgccgacaactgcgtttatcgtatattcagcggcaggtgccggagcttctgtagcggccctgtttatggcaggatggatcccgggacttctctgggcagcagcatgtatgatcgtggcatttttctttgcaaagaaacatggttatgtgatcaaacgtgataagatgacatggggaatcattgggaaaacagtatgggaagcaatcccgagtttattccttgttgtgatcatcatcggtggaatcttatccggatattttacaccgacagaggcatccggtattgcggtagcatacgcatttattctgtctgtgtttatttacaagactatcaaattgagtgaaattccaaagcttctcgtagatgcagcggtaatgacaacaacagttatgctgatcatcggagcttcttccgtactgtcattcgtaatgtcatttacaggacttccacaggcgatcagcagcctggtacttggaatttctgacaacaagatcgtgattctgctgatcctgaatatcttccttctgatcgttggaacattcatggatatggcaccggcgctgttgatctttacaccgatcttccttccgatcgtgcagagctttggaatgagtccgatccactttggtgtgatgatggttatgaacctttctgtaggaacaattacaccaccggttggaaacgtactgttcgtaggaagcagtgttgcaaaacttcaggtagaacaggttatgaaacgtctgattccaatgtatgcggcaatttttgtagccttgatgctggtaacttacattccggcactcagcgagtggctccctactgttttgggactcctggagtaatcggatttttgtaggtgattccgtttaacgtttttcggtatttgagcggagaaatactcatataagtcttgaataccttttcaaaataggtaatactctcatagccgactgtagcagcgatctcagagatgctcagagaggtctcctcaagaagctgttttgcacgtttggtacgcaggatgttgacatactcattgacgccgtagccggttacctctttgaaggagcgacttaaataaaacttgctcagataaaagattccggcaaggccgtccagggtgatcggttcggcataatgatcagaaatgtagtcggctatgttataaatcgtctggtacttgctgcttttgtgaacggcagtttcatctttgaccggggtcagctttgggttgtcccggataaagtcaataaaataacggatgatctccatctcgatcacggctttataactgcggctgcggttggaaaactcagttgttaacacatcatacatgtgtaaaaaacgttcctgctgtgtctgcgtcagattataaacaccatagtgttcacgaaaaaaagacaccagattgagatgagaaaatttttcatcaaattgctgcattttggatttgtcaatatacagaatgatacgggtgtacccggttgtgtcatcttccgtggcatgggtcatatggatcaggttggtatcgaccagaatcaggctgcccttctttacatgataggcacggttattaaagaaaaaaagccgttctccttctgtgagaaaataaatctcgtattcattgtgaaaatggttggaacgcatatcatatccactggaacgctttaagtgttccagggaaattccgtccatttctgaataataaatgatagtatccatatagtatctcctttggtgtgagctgcagtgagtgcattgttaaggaaattataatatagaaatcataaaaaatctatatgaaaggataggcagaagaatatgaagaatatcaaaaaagaactgatcgagcaaaaattgaatctggttgtagaaaaactgatgaatcttggcggtccggagaatgaagatgaattaaaagacggcggagaggcaatcggatttttcaagcgtgattttggaatcgcagagtgggactggccacagggagttggactgtatggccttttgaagatgatgaaaatacagggaaatgacgattacaaaacattcctgcatcagtggttcaaaggaaatatcgcagatgggcttccgtccagaaatatcaatacaacaactccacttctgacacttgcagagttgaacgaagaatatcaggacaaagagtttgaagcactctgtctggattgggcagactggttgatgaactgcatcccaagaacaaaagaaggtggcttccagcatgtaacaagtgcaaatggagacagacaaggagtccgtttaaacgaaagtgaaatgtggatcgatacattgtttatgacggtgctgtttttgaacaaaatgggacagaaatatcagaaacaggagtggatcgacgaatccatccatcaggtactgatgcatatcaaatacttgtatgatacccataccggtttgttctatcatggatggtccttcaatcgtatggataattttggcggtattttctggtgcagaggaaacagctggtttacactgggaatcctggattatgtggagatgttcaaaggaacactcaatgcaggcgtgaaggcgatcattttggatacatataaggcacaggtaagaaaactcaaagaattgcagagcaagagcggactgtggcataccgtactgacagatccggacagctatgaagaagtttccggctccgcagcgatcgttgcaggaatcctcaaaggaatcaaaatgggaattctggatgactcttatctggaatgtgcatggaaaggtgtacaggcaattctgaaaaacattgacaaagacggaactgtattgaatgtatctggaggaacaggtatgggatacgatgcggatcattacaaaaatattctgatcgcgccaatggcatatggacagtcactgactattctggcattggtagaagcattgcagctggcagaataagacagtagaaaatcaagtgcaaataaggacgctgttttatataaatagcgtcctttttttacacttttttcttttttataatagtagtaagaaaagtgcaaaagggaggcagaaaatggacaaatattatttggctgttgacattggcgcatccagtggccgtcatatgctggcaagtatgaaagacggaaaaatgcagttggaagaagtataccgttttccaaatggaatgacagaaaaggacggaactctctgctgggatgtagagcgtctgtttacagaaatcaaaaacggactgaaggcatgtaaagagcttgggaaaattccggtatccatggcaatcgatacctgggcggtagattatgtactgttggatgagaatgataaaattctgggggatacagcaggatacagagacagccggacgaatggaatggatgagaaggtatatgagaaaatttcactgggagatttgtatgcaagaaccggaattcagaaacagatcttcaatacaatctatcagttaatggcggtcaaagagacacatccggagcagcttgaaaaggcagagtcgatgctgatgatcccggattacttccacttccttctgaccggagtgaaaaagatggaatacaccaatgcaacaaccacgcagttggtaagcccggtgacaaaggactgggatcaggaattgatcgatctgcttggatttaacaaaaagattttcaaagaaatttccatgccgggaactgtggttggaaactttacggaagaaattcaaaaagaagtcggatttgactgtaaggtggtgcttccggcaacacacgacacagggtctgcggtacttgcagttccgacaaatgatgacaatgcaatctatatcagctcgggaacatggtctttgatgggaattgagcggaaggatgcggactgctctatggagagtatgcaggcaaacttcacaaatgaaggcggatatgattatcgtttccgtttcctgaaaaatattatgggactctggatgatccagtccgtgaaaaaagaatggaaggaagatctttcttttgcccagatttgtgcacaggcatccgaagagcatatcacttcgttggtagactgtaatgatgattgtttcctggctccaaagagcatgatcgaggcagtacagacattctgtaaagagagtcatcagcaggtacctgagacgatcggagagattggagcagtcatttataatagtctagcaaaatgttatggagagacgatccgggagatcgaagaaatcacaggcaatacatacgatacaatctatgtagtcggaggaggtgccaatgcagggtatcttaatgaactgacagcaaagtatacaaagaaaaaagtttctgcgggaccgacagaggctacagcgattggaaatattacggttcagatgctgcatgatggagtgtttacatcacttccagaggcaagaacctgtatcggaaattcatttgatatccgtcactatgatgaaaacggaaacgaaaattaggaggtataaaagcaatgacaagatatgaatcagcaaaagaaatgtatgcaaaattaggagtagacacagatgcagccattgaaaaatgtatgcaggtaccggtttctctgcactgctggcagggggatgacgtcacaggatttgatcatgacggccctctgacaggcggaatccagacaactggaaattacccgggaaaagcaagaactccggaagagttgatggcagacatggacaaagcaatgagtctgatgccgggagcaaagaaaatcaacgtacatgcatgttatgcaatttttgaagatggagaatttgttgaccgcgataaactggagccaaaacacttccagaaatgggtagattttgcgaaagaaagaggaatgggactggatttcaaccctacattcttctctcatgaaaaagtaaaagacggtctgacactttccagcccggatgaagagacaagaaaattctggattgagcatggaaaagcatgtatccgtatttccaagtattttgcagagcagacaggaatcccatgtgtgatgaatatctggacgggggatggattcaaagatgttccggcagaccgcatgggaccaagagttcgttacaaagaatctatcgatgagattctctctgagccatatgatccaaagatggtaaaaccttgtgtagaatcaaaagtgtttggaattggagtggaggcatacacagttggttctgcggaatttgcgctgagttatgctgcaatgaacaaagaaaaatgtctgccgctgatggacaatggacattaccatccaacagaggttgtttcggataagattccggcattactgacatttttcccggaaatcgcactgcatgtgacacgtccgatccgttgggattctgaccatgttgtattatttgatgatgagacaaaagaaattgcacaggaaattgttcgctgtgagggaggacttgacagaacatacattgcactggattattttgatgcgtctatcaaccgtatttctgcatgggtcacaggatttagaagcttccagaaagcactgctcaatgcactttgtacaccaagcgcactgttaaaagagcttcaggataccaatcagatgtcgaagaaaatggtagtgatggaagagtgcaagacccttccgatcggagatatctgggaagagtactgcagaagatgcaatgttccggcagaaggctggtttgaagaaattgaaacatacgagaaagaagtgcttgcaaagagagcataaaaatacaggggagtgtcgctcaaagtgacactcccctgtttgtttttacacccgccacttttcaagccagcttaaaaattcgctggatgagcggtttaagattagttcttccggaaattcggcgaggcggatcagttccatagcgtgagaaaaatctccgatgtgttcagtcccatgactgtcgctggacaacaggatcggatagtggaagtgcttgcacaggttgagcagcatcatatcattgaaacgggtatctccccggtaaccgtccgggcgcagtgaactgtcattgagttccaggatgacatgatgttccattgcagcctctgtcaccgcaagataatctaccggaaattttacgtcatcacaatgcccgaggatccgcacatatgggtttttcattgcttcaatataagactgtgtattttctgcttctgacccggggcgcttggcaggacggtgcagactggcaatcacataatccagtggtttcaaaatcgtatcgtccagatccagttttccatgatgatctaaaatgctgacttcagcaccatacaacatacgaattcccatccggtttttgggggcatacgtaagatttcggaaatatgcaggctttccaccgccaagtgtggccggaccgtgatcagaaatcccaagcatatttaactgttttgtatgcgctgttttaaccatatcggtaattgtagcagcagaaccatgcccgctggcaattgtatgtgtatggatatcaaattcaaaatgtgacatgaaatctccacctttccatcattctgtatccagtatgatggatttttgtggttttgtcaatgttttgacttgtggttttcgagaaaaaacaacaaaaaccacacggaatcaattctgattccttttggtttgaggggaataaaacgaaaatggcagtggagttttgttgacttccatttcagtgtaaagtataatgacggtaactggatagagagaggttttctttagaaagttaatacaaacaggagaaaggagcaacaaggcagatgggattgtatagttatgacagcacagaaattccaaagtcagacagaattccgaaactgatagacgatctgtatgcaaagatgcctgagattgaatctgcaagagcagttctgatcacggaatcttacaaacagacggagaatgagccgatggtgatccgcagagccaaagcctttgctcatattcttgagaatcttccgatcgtgatcagggatctggagttgatcgtgggaagtacgacgatcgcaccgagaggatgccagacgtatccggagttttcttatgaatggctggaagcagagtttgacacagtgaacacacgaagcgcggatccgttctatatttcggagaagaccaagcaggaattgagagaggccaatgcctactggaaaggaaagacgaccagtgaacttgccacttcttacatggagccggagacgctgcttgcaatggaacacaatatttttacaccggggaactatttctataatggtgtggggcatgtgacggtaaaatatggagaggtgcttgcgatcggattttccggaatcaaggcaaacgctcaggcagagctggagaagttatgtctggcagatggagagtatcagaaaaagtcccgtttcctgaaagcagtgatgatcagctgtgatgcggcgatcgaatatgccagaaggtatgcaagacttgctttaaaagaagcagaggtgtgtgcagatccggttcgtaaaaaggaattgcttcagatcgcccagaactgtgcgaatgttccggaaaaaggagctacaggattttatgaagcctgccagtcattctggtttgtacagcagcttcttcagattgaatccagcggacactcgatctcaccgggaagatttgatcagtatatgtatccttattataagaaggatctggacagcggcaggatcacccgggagtttgcacaggaactgatggattgtatctgggtgaaactcaacgatctgaacaagtgcagagatgcggcgtcggcggaaggatttgcgggatacagcctgtttcagaatctgatcgccggagggcagaacgaagacggaatcgacgtgaccaatgatctttcctttatgagtattcaggcttctatgcatgtattccttccgcagccttcactttcagtgagagtatggaacggaacgccgcatgaatttctgatccgggcagcagagctgacaagaactggaatcggattgccggcgtattacaatgacgaagtgatcatcccgtctctgatgagcaggggactgactcttcaggatgcaagagattacaatatcatcggatgtgtagaaccgcagaaagcaggtaagacagaaggatggcatgatgcggcattcttcaatatgtgccggccgttggaactggtattctcaaatggaatggacaaaggagttcgtatcggtccggcaacgggcaatgtggaggatatgaccacatttgagcagttctatgatgcgtataaagcgcagatggagtatgcgatccagcttctggtcaatgcggacaatgccatcgatatggcacatgcacagcgatgtccgcttccattcttatcttccatggtagatgactgcatgaaagttggaaagaccgtacaggaaggcggagctgtttacaactttaccggaccgcagggatttggagttgccaatatggcggattctctctatgcggtaaaaaagcttgtttatgatgagaaaaagatcaccatgggtgaactcaaagaagcgcttgcaacaaactacggaaaaggtcttggagcagaggatgtagctgccatgacagctgagattgcaaatgaactgaaagaagcaggaaagaccatcggtgaaaaagaagtggcagcaattttaaataccgttgttgcggcatcggaagcgccggaagtcaaggcaaacggagaacgaatcctgaaactgatcgagaaggtgccaaaattcggaaatgatattccggaggtggacgagtttgcaagagatgtcgcttacacttatacaaaacctcttcaaaattacaaaaatccaagagggggttctttccaggcagggctttacccggtatctgcaaatgtaccacttggtgcgcagacgggggcaactccggacggacgtctggcataccagccggtggcggatggagtatcgccatctgcgggaaaagatgtcaacggtccgacagcagcagcaaattcggtttccagactggatcactccattgcgtccaacggaaccttatttaatcagaaattccatccgtccgcactcagtggaagaaatgggctggagaattttgtaggactgatccgttcttactttgatcagaagggaagtcatatgcagtttaatgttgtcagcagagagactctcttagatgcacagaaacatccggagcagtacaaacatctggttgtacgtgtggcaggctacagtgcactgtttacaaccctttccaagtccctgcaggatgatatcataagaagaactgaacagggcttttaagaggcagacagaaaggacgggacatggaagattatttaaaaaccagaggacggattttcgatattcagagatattcgatacacgatggcaatggaatccggacgatcgtctttttaaagggctgcgtgcttcgctgcagatggtgctgcaatccagaatctcaggcatatgagattgagacgatgatggtacagggagagcaaaaggtcatcggtgaggatgtcacagtcggtgaagtgatgaagacagtagaaaaagacagaccgtactatcgaagaaccggcggaggattgacgttatccggtggagaaagtttgtgtcagccggagtttgcaagagatcttctgcgtgctgcccacgaggcgggaatcacgactgcgatggagagcatgggatgtgcagaatatcgtgtgatcgaggagattcttccgtatctggatcagtacctgctggatatcaagcatatgaattccggaaaacatgaagcgttcactggacgcggcaatgagctgatgctggaaaatgcgaaaaagattgctgcttccggtatgacggaactcagtatccggatcccggtgattccgggattcaatgatacaccggaagaaatcagggatattgcggtatttacaaagacacttggtcatgtaaagcgactgcacctgcttccatatcacagactggggcaggataaatacagcggcctgaatcgggtgtatctcatgggagaggcccttcctccgaccaacgaaaaaatgcaggtgctgctcaaggtggcgcaggagttttcaggagtagaatgccaaatcggaggataaacaaaaaacaacaaaaacaacaccttcaaaagttgactgttgtgggtttgtgtggtaatataagataagaaccaacaagaaacaaaaggtttgttttaagaatccaaggaggaaaaaaggatgcaaaacgaatacgaaatcaaaaaagagatgtgtgaaatcggtaaaagagtgtataatcgcggaatggttgctgcaaatgacggaaacttttctgtaagaatcagcgaaaatgaagtattatgtacaccaacaggtgtcagcaaaggtttcatgacacctgattatatctgtaaagtagacctggacggaaatgtacttcaggcaaacaaaggtttcaaaccttcctcagagatcaaaatgcacttacgtgtatacaaagaaagaccagacgtaaaatcagttgtacatgctcatccactgtatgctacaacatttgcaattgctggtattcctctgacacagccaatcatgcctgaggcagtaatcgctctgggatgtgttccgatcgcaaaatatggtacaccttctacagtagagattccggatgctgtatctgagcacctgcagtatttcgatgcagttcttcttgagaaccacggagcactgacatactctgattccttactgaatgcttatcataagatggaatctgtagaattttatgctcgtctgttatggcagacaatgcagatcggcggaccacaggaactgaacaaagagcaggttgaaaaactctatgaaatcagaagacagatgggactgagcggaaaacatcctgcaaatctgtgtccaaacgcaaaagctggaaaaccaagctgccacacatgtggagcagcatgcagcgctgcaaagacagacgatacaccggatgcagatctggtagcatctatcacaaagaaagttatggatcagttgggactgaactaattttagaaagaggactgctatgaatgaacaggatatttccaaagctgtggcggcattgctggaacagatgaacggacagcatgcgcatcacggggaaggtcatgtctgtcagtgtaaaaagcatgtaatgaccctgaagcttgccaatgctttgatcgaaaaagtaaaggcatatgcaaaagaaatgggagtcaatgtagtcattgcagtatctgatcaggcaggtcgccctgttgcagtccagtgtatggatgatgcgtacatagcaagctttgatatagcacttaataagacatttacttcagcgagcctaaagatgtcaacggaagaacttagtcatttaagccagccaggacagtcgctgtacggaattcagtttaccaaccagggtaagatcgtgattttcggaggtggagagccgctaaaagcagatggcaaaataatcggagctttgggcgtcagcggtggcagtgctgaagaagacactgcgatagcagcctatggcaaagagatttttgaggaggtattggcgtgtctgtaaatgaaaaaatggtacaggacatcgtacaggaagttgtggcaaaaatgcagatttcttccgatgtatccggaaaaaaaggcgtattttctgacatgaatgaagcaatcgaagcttccaaaagagcacagaagatcgttgccaagatgtccatggaccagagagaggcaattatttccaggatcagagaaaagatcagagaaaatgcggaaatccttgcacgcatgggtgttgaggaaacaggcatgggaaatgttggacataaaattttaaaacaccagctggttgcagagaagacaccgggaacggaagatatcactacaaccgcatggtcaggagacagaggactgacactgatcgagatgggaccattcggtgtgatcggagcgatcactccatgtacaaacccaagtgagacagtactctgcaatacgatcggtatgctggcaggtgggaataccgtggtatttaacccgcatccggcagcaatcaaaacatctatttatgcgatcaatctgttgaatgaagcatctgtagaagttggcggaccagagaacattgcagtgacagtggaacatccgacaatggaaacaagcgacattatgatgaatcacaaagatattcacctgatcgcagcaaccggaggtccgggagttgtgacagcggttctttcttccggtaagagaggaatcggagcaggtgcgggaaatccgccggcgttggtggatgagacagcagatatcagaaaagcagcagaagacatcgtaaatggatgtacattcgataacaatcttccatgtattgcagaaaaagagatcgttgcggtagattctatcgcggatgaacttcttcactacatggtaaatgaacagggatgttacatgatttccaaagaagagcaggatgctctgacagaagtagtgttaaaaggcggacgtttgaacagaaaatgtgtgggacgtgatgcaaagacacttctcggaatgattggaatcacagttccggataacatcagatgtattacatttgaaggaccgaaggaacatcctctgattgcagaagagctgatgatgccgattcttggagttgtaagagcgaaagattttgatgatgcagtagaacaggcagtatggctggaacacggcaacagacattccgctcacattcactctaagaatgtggataacattacaaaatatgcaaaagcaatcgatacagcaattcttgtgaaaaacggaccatcttatgcagcccttggattcggcggagaaggatattgtacgtttacaatcgcaagcagaactggcgaaggacttacaagcgcaagcacattcacaaaaagaagacgttgcgtaatgacagacagcctgtgcattcgctgatagaatgcagacagtttcgtcaggcagtataaataggaggaaacaaacatggaaatgaactcagcaagtgtggaagcagttgtaaaacaggttctggaaagtatgctggaaggaaagtcagcagtaaaagcacctgtagcaaaagcaaacacaggaagcaatgaaattccaaagacagcacacgtagcaatgctgacagctctggaaaattatgaagtaaaagaattcccgatgccggaagttggcgacggagacattcttgtaaaagtagaaggatgtggaatctgtggaacagatgcacacgaattcaaaaaggatccatttggactgatcccggtagctcttggtcacgagggaacaggtgagatcgtaaaaatgggtaaaaatgtaaaaacagacagtgcaggaaaaccattgaaggttggagacaaagttgttacttgtatgatcttcaaagacaatccggacatcacaatgttcgacctgaataaacagaacgtaggtggagcggatgtatatggactgcttccggatgatgatattcatctgaatggatggttctcagattacatcttgattcgtgaaggatctacagtatttaatgtaagcgatctggatctgaaatcccgaatcctgatcgagccttgtgcagtattgatccatgcggtagagagagcaaagacaacaggaatcttaagattcaacagcagagttgttgttcagggatgtggaccgatcggtctgatctgtatcgcaattcttcgtacaatgggtatcgagaatatcgtagctgttgacggagaacagaagagacttgattttgcgaagaagatgggtgcagaaaaatctgtaaacttcaaagatttccagggagtagaagctctggccaaaggagtggaagatgcatttggaggatatccggcagacttcgcattccagtgtacaggatcaccgatcgcacacgcaaatatctataaattcatcagaaatggtggagggctttgtgaacttggattcttcatcaacggtggagatgcaacgatcaacccacacttcgacctgtgctcaaaagagatcacactggttggatcctgggtatatactttaagagattatgcaacaacatttgatttcttaaagagagcaaaaggaatcggacttccaatcgatgagctgatcacacacgaatacccattggaggagatcaacgaagctcacagaacaaatcttgcaatggaaggcctgaagatcgctattatcaacaaatagtgacggccattccagagaaggagaatggatatggcagaagcagtaggcatgcttgaagtattcggtctggcaacagcttttgcggcagcggatgctggctgcaaggctggaaacgtctggctggagaattttgataaaaacaaaccgggcaatgcagatgagttaccggtacctttgatcgtgatgatcaagttccgtggaagtgtttctgatgtgcaggcagccttagaggctgcaaaagcaaaagcagagcagctggcaggggttgtgaatgaatatgagatcgcaagacctacagaggacacggaaaagatgttaaagatcagtgcgtttgataagggaacaccacacaaaataaacgaagaagagattgaagagatttaattttaggaggatttaaaaatggcaatggcacagcaggcattaggaatggtagaaacaagaggacttacagcagcaatcgaagcagcagatgcaatgacaaaagcagctgaggtaacattagtaggaacagaaaaaatcggatccggactggtaacagtaatggttcgtggagatgttggagctgtaaaagcagctgttgaaacaggagcagatgcagcaggaagacttggagaattagtagcaacacacgtaatcccaagaccacacaacgacgtagaaaaaatccttccaactgtataatttaaggattacagaaagtaaaggagaagtctcatgggacagtgttatggattttttgaaatcccaagtgtaacagcggctattgatgctgtcgatattatgtgtaaaaccgcagatgttgagatgatcacctgggagaaaaaactgggcggacgtcttgtgacgatcattatccgtggcgatgtatccgctgtcacacaagccattgaagctgccgcagcgaatggaatcaaagagccggtatgttatacggtgattccaagtccccatgaagagatcatcaaattgattaacaagagcgtcaatcggatacgttaggaggcagcccttatggcagaggaaaagaaaccggcagagcaggagagcgcaaagacaactgcaaaacctgccgcaagaaagaaaacaactgcagccaaagcgccggccaaaacggtacagagagtaaggaagagcgcgaaaaaggcagagcaggcggaaacaaaagtagaattgaaggaggaacgaagaatggcacaggaagcattaggaatggttgaaactagaggtcttgtagcatctattgaagcagcagatacaatgttaaaagctgcaaacgtagttttggtaggaacagaaaaaatcggttccggactggtaacagtaatggttcgtggagacgttggtgcggtgaaatctgcagtagaatctggagcagaagcagcaggaagacttggtgaattagtggcaacacacgtaatcccaagaccacacacagacgtagaaaagattcttccggcaatcaaataattttggtttcaaaaaatgcccgaatcatttcagtcagcggtaacggttgcaaatgagagcatatgtgagtgtaaaaactcacatatgttcttgtgctacagccggaacaacgggcgggcatgcattgatgaggagaattggtatggacaataataatgtagcattgattacaaagatggttctggaagcggtagaaaaacagaaatcttccgaaaaagaaccgggatatctggtgccggtaggtgtatctgcaagacatatccacttgacacaggagcatgtggaagtgttatttgggccaggatatcagctgacgaagaaaaaagaactgatgggcggacagtttgcctccaatgagacggttacaattgtcggtctgaagctcagagcaatcgaaaatgtgagaattctgggacctgtaagaagcaaatcccaggttgaggtttctgccacagatgcaattaagcttggagtaaaagcgccgatccgggaatccggaaatattgcaggaagtgcaccaattgcagtagtcggaccaaaaggtgcgatttatctggatgagggatgtattattgcaaaacggcatatccacatgtcaccaaaggatgccatggcagctggagtacacgatggagatatcgtatctgtacaggcggacaatgaaagaggtactgtttttaatcatgtacagattcgtgtggatgacagttttacactggaaatgcatatcgatactgatgaagcgaatgcagcaaggattgcgactggacagactgtaagaattataaaatagagacttacattagaaaatcgcaagaggaagtgaggaaagtatgatagcaggaaaagtagtagggagtgttatctcgacacggaaatgtgaaaatttggtcggcaataaattcatgatagtggatgtgctggatcatatgcagacatctggaaaacaactcattgcgattgacaagatcggagcgggaataggagaatatgtgctggttgcacagggaagtgctgccagaatcggatgcagcatgagcgatgctcctattgacgcagcgatcgttggaattattgacgatggaacaggactggagtagtgaaattatggatatgaaagaattaagcagcatattgcagcaaaatggaattgttggtgcaggtggtgcaggattcccgacttatgcgaaactggatcagcgtgcagaaacaattatcctgaactgtgcagaatgtgaaccactactgagattacatagacagttattggaaaaatatgcgcgtgaaattgtggatacatttcacctggtaggtcaggctgtaggcgcaaaagaagtcattatcggaatcaaaaaagcatataagcagacaattgaagctgtcgaaaatgtgatgggagcctatccggaagtacggctgggactgttggatgaagtatatccggcaggtgatgaagttgttttgatctacgaagtgacaggaaaggttgtacgtccgggcggacttccaatcgaaagcggcgttgcagtattcaatgttgaaacaatttacaacgtatggcgtgctatgaatcagcagactcctgttgtagataaactggtatccgttgttgccgaggtagaacatccggtgacagttcgtgtaccgattggaactacaatcgaggaagtcgttgcactggcaggcggaacaacagtaaaggatccggtatattttattggcggcccgatgatgggattcatcggaagcggttcgcagccggttaccaaaacaacaaatgcggtacttgtattgccgcaggatcattatctcgtgaagagaaaacgaagcaaatcatccattgacatgaaacgtgcagctgcatgctgctgtcagtgttcaatgtgtacagatttatgtccgagaaatctgcttggacatccgatcgagccacacctgtttatgcgtgcggctacatgcaaagacgttcagcagccgaatatctttatcaacacattcttctgctgttcatgtggtgtctgcgaattgtattcctgcccacaggagctttctccaagaacactgatgttggaatacaaaaacggacttcgtgcgaacggacttcgcgcaccggaagtgacagcagcaccggtaggagaagaaagatcttacagaagagttcctatggaacgtctgatgtcaagactggatctgacaaagtataataaagaagctccgctggatgaatccgtggttccggtaaaacgggtaaagatcatgttgagccagcacattggagcacctgcttcctgtgttgtaaaaccgggagatatggtagtcaaaggacagatgatcgcagagccggccaagggattgagcgttggaatccacgcttcagtcaatggtctggtaagcgaagtaaatgagaaatatgtggtcatagagacacaggaaggacgtgcagataatgagtaaggcaattggaatggtagagtataagactacttcagcaggtgtcgtagcagctgattctatggtaaagacttctgaagtaagcattatcgaagcgcagaccgtatgtccgggaaaatatatcgtgatcattacaggagacttaagtgcagttacatctgctgttgaaaatgcaaagacaatgcatggaaaacatctgatcaacagttttgtacttggtaatccgcatgaatccattttccctgcaatttatggggctgcagaaatcaaggatgtatcagcactgggtatcattgagtcctatgatgcatcttctatcatcgtggcagcggatgaagctgcaaaaacagcaatcgttgatttgatcgaagtgcgtctcgcaagaggtatgtgtggaaaatcttatctgatgctgacaggagaagttgcggcagtagaagctgcaattgacagagcaaaagaggcagtatctgatgatggtatgtatctggactctgcagtgatcgcacatccggatgcacagatccgcgatgcaattttataattgagaaattcagccatgacaagtatcagaaaacagatattttccagtttggaagatcatgttttctgatatttgtatacggcgattacaaaggttttgagacagaatttatcaggaggcaacacgatgctggcaattgaaagacgtaatgaaattctggaaaaactacaggccgaccggagagtcgttgtaagtgaattgagccagatttatgatgtgtccgaagagaccatacgaagagatctggataagctggtgaatgacggctatgcgatcaaaagttatggcggtgctgtgattaatgagaacatgaatatagacctgcctttcaatatcagaaagaaccgcaatgtgatcggaaaacagcggatcgcagaaatggttgcgaagattgtgcaggatggagacagcattatgctggatgcaagttcgactgcagtctatattgcaaaaggactgaaagataaaaagaatctgacgctgatcacaaattccatggagattgtgatcgaacttttggatatgtcagattggagagtattgtctaccggcggagtatcgagagaaggatcgttcgcccttgtaggaacgcagacgaaccgaatgcttcagtcgtatcatgcagacaaagcaattatctcatgcaaaggtctggatatggcagcaggacttacggattctgatgaacttctggcagacaacaagcggacgatgctggagagtgccaaggagcgtattcttgcaatcgacagcagcaagtttgggacaaccgcctttatgacagttggaagactgaaagatattacaacaatcgtaacggatgaaaaacctgagataaagtggctgaaagaattcaaaaagttagggatagagtgtatctatccagaataaaggaaggacgctatgaagagctttgatataaaaacaaaagtatactttggagacaatgcattagaccgtctttcagagatcccttacaaaaaagtactggttatcacagacccgtttctggcacagagcagcatgatcaatctgatcacagatccgttgaagaagggacatattgagtatgacatttttcaggatgttgtgccggatcctccgatcgaaaaaatcagtgaaggtgtgaaaaaattactggagtataaaccagaggcaatcgttgccgtaggtggcggttctgcaattgattcttccaaatcgatccgtgaatttgcagtacggatcgagcattatggagatgtggggctgatcgcaattccaacaacgagtggtactggttcagaagtgacttcttttgcggtcgtatctgacccggcagaacagagaaaatatccactggtatccagagatttgacaccagatgaggcgatcctggatgcagagttggtaaaaagtgtaccgcctgcagtaacagcagatactggtatggatgtatttactcatgcactggaagcatgtgtgagcacgtccagaaatgattttgcgactgcgttggcagaaaaagcgattgaaatctgtggagtatttctgttgagagcatatttggatggaagcgatactcatgcacggcagaagatgcattctgcatcctgtctggcaggtcttgcatttaattccgcttctttgggattgaatcatggaatggcacatcagcttggcgcaacattccatatcccacatggacgtgcgaacgcgatgctgcttccgcatatcattgagttcaacagtgatatcaacaagcacagtaaaagtcaggcaaaatatctgccggctgtagaaagatataaaacagtagccagaattttaggactgagcagttataacacgatcatgacggtcagaaaccttgtcaactgggtgcagtttatgttaaaagagatggatattccactgtctatttcacagatgggcaagatttcgaaagaagaatattttgcagagattgagagaatggcagaggcagcgttggcagatggatgtacaacaacgaatccaagagtgccaagcaaagcagatgttatgaagatttatgaaaatctgtggtaaaaaagaaaaataatgtgaataacaatagaaaagagcagcagaaaagtggataactttcctgctgctcttttttggaaataacaccgcaaaaaccatccgaaatacaggaaaaacagcaattttcctcaactttttcaaacaggattgtgctatagtaaacacaatcacatgaatacaggaggaaaacagcatggtaagaaaaggatttaggatgaaaatatatccggatatggcagcagaatatgaaaaacgtcacaatgagctctggccggagatgaaagatatgatccatgaatatggcggccggaattatacgatttttctggatcgtgcaaccaatatactctacggatatatcgaagtggaagatccggcaaagtgggatgagagtgcagatacggcaattaaccgtaaatggtgggattttatggcggatatcatggagaccaatccggacaacagcccggtatgtacagatctccatgaagtgttccatttagactgatcatacgagaaattctttttgcatatcccggaaatctttgggagaaatcccgtattcttttttgaatgcccggtaaaaactggagtaatctccgaagccaaaagtctgataggcttcggtgatactcatttgtccaagaatggcttccctgcaaagggcaagccttttttttgtaatatactgatgaatggacagtcccagattgtctttgaatatgtgagcaatgtggtatttactgacaaaaaattctccggcaagtttttccagggagaggtcttcctccagatgttcttcaatataagctgcgacattctgatacagagattcttctgttcgggctttgcggggatgcagccgttcatagatgagccggttcaaatataaaagcaggtcgttgacataaagcggaatctgtgcgtctctgccaaagcgatccgaatgcatctcttcaaggaggcgcagcagtttcgactgaatggcattgaacgtgatccggtttgtaggaaagatataatttctgctgacttgtacatgctgcatcaaataagcataatccttggaaatctgcatcaaatggctgcagtattcctggctgatccagaacacaaaccgacggtaaggtgtagacatactgtggatgatcggacgatgcgcaatgcaaggaggcaccagcatgatatccccggaatggatcggatagacttctgtgccgatctgaatacggatatctccttccataaaaaaataaaattcataataattgtgagagtgcaggtctactttggacagattatggtcattataataatagagttcaaaatctcgtgacagcatgtgctggcgtgtaataaatgcagattgtagattttttttcataaaagctcctctgaaaacaggaataaatcagacgttgatcgggttctttttttagagtagcatgaaacaacaagatttgcaatgtatacaacaactaaatcaatggtatttttgagcatattttttataatgaatgtaacaaggttattgttcacatcagtcattggactggcataagcacgacgattgtgtatgtataggaaattgatgtgaacggtaatgaaacaagagatttcaaaaaaggaaggtatgaagactatggaaatgacactcagatggtatggagctaaatttgacacagtgactctgaaacagattcgccagattccgggagtaacaggagtgatcacaacactgtatgatacagcaccgggagaagtgtggagccgtgaacgtatccgtgcaatgaaagaagaagtagaggcagcaggacttcatgtagcgggaatcgaaagtgtaaatgtgcacgatgcaatcaaaacaggcgcacctgagagagatcagtatatcgataactacatcgagacactggaaaacctgggaaaagaagacattcacctggtgtgctacaatttcatgcctgtatttgactggacaagaacagagctggcaagaatgcgtccggatggatcgacagtacttgcttacacacaggaagcagtggatgcgctggatccggaaaagatgtttgattccattgcaggagacatgaacggaacagtgatgccgggatgggaaccagaaagaatggaacatgtcaaagaattgttcgagatgtacaaagaaatcgacgatgaaaaattgtttgaaaacctgaaatatttcctggagagaatcatgccggtttgtgacaagtatgatatcaacatggcaattcatccggatgatcctgcatggagcgtatttggactgccacgtatcatcatcaataaaaagaacattctccgcatgatggaaatggtagataatccgcacaacggtgtgacattctgctccggttcttatggaacaaatctggagaatgaccttccggatatgatccgttccctgaaaggaagaatccactttgcacatgtccgtaacctgaaattcaactctccgacagattttgaggaggcagcacatctgtcttctgacggaacctttgatatgtatgagatcatgaaggctctttacgaaattggatttgacggaccgatccgcccggatcacggacgtatgatctgggatgaagtggcaatgccgggatacggactttatgaccgtgcactgggagcaacatatttaaatggtctgtgggaagctattgagaaaggagccagataatcatgagattaagtgcagaaggactcaaagacagagcaaaatgggaagaggcgggatacgcccttccaaaatttgacagagagcaggtagcaaaagcaaccaaagaaaatccattctggattcattttggtgcaggaaatatttttcgtgcatttcaggcaaacgtggtacagaatctgttaaacgaagggattctggatcgcgggctgatcgttgccgaaggatttgattatgagatcgtagaaaaaatgaaccatccacatgatgattacaccattcttgtgacactcaaggcagatggaaacattgagaaaacagtagtcggaagtgtagtggagtctttgactgtcaacacagaaaatgtatctgattttgcacgtctgaaagagatttttgcaaaagattctctgcagatggtgacgtttacgatcacagaaaagggatacagccttgtaaacggaaaaggggaactgcttccggatgtagaggcagactttgtaagcggtccggaagctccgaagagctatatcggaaaagtggcagcgcttctttatgcgagatatcaggcaggagaaaaaccagtggcaatggtcagcatggacaactgttctcataatggagataagctgtatgcggcgattcatacatttgcagaaaaatgggaagagaacaaacttacagatgccggattcagagcatatgtaaactgcaaagaaaaagtgacattcccatggaccatgatcgacaagattacaccacgtccggatgcttctgtagaagagctgctgaaaaaagatggaatcgaagagctggatccggtgatcacatccaagaacacgtatgtggctccgtttgtaaatgcggaagagtgcgaatatcttgtcattgaagatgcatttccgaacggaagaccagaactggaaaaaggcggcctgatgtttacagagcgtgagacagtcgataaagtagagaagatgaaagtctgtacttgcttaaatcctctgcatacagctctggcagtgtttggatgcctgctcggctatgaaaagatttcagacgaaatgaaagatgaggaactgaaaaaattagtagagacgataggatatcaagaaggacttccggttgtagtcaatccgggagtactggatccgaaagagtttattgatacagtacttcaggttcgtgttccgaatccatttatgccggatactccgcagcgtattgcaacagatacttctcagaaactggcaatccgttttggagagacgatcaaagcatatgcagcatccgacgaactggatgtcaaagacctgaagttgattccgcttgtatttgcgggatggctgcgttatctgatgggcgtagatgacagcggaaaagcatttgatttaagtccggatccgctgcttacaaccgtttgtccatatgttgcagatctgaaactggaagacggacaggatgtagagagcgccgtgtcagatgtattgaagatgaagcagattttcggtgttgatttatatgaagcaggacttgcagacatggtatgcggatatttgaaagaaatgacaaaagcaccgggagctgttcgggaaacactcaaaaaatacgtataggaggaagcggtatgaaagcatttatggatcaggattttctcctggatacagagactgcgaagatgctgtatcataattatgcagctaaaatgccggttttggattatcattgtcatatcagcccacaggaaattgcagaggacagacagtttaaaaacattactcaagtgtggcttggaggagatcattacaaatggcgtcagatgcgttccaatggaattgaagagcgttatattacaggagatgcttccgatcgggagaaatttcagaaatgggcagaaacactggagcgtgcgatcggaaatccattatatcactggagtcatctggaattgcagcggtattttggatatcatggcgcattaaatgcaaaaacagcagaagaagtatggaatctttgcaatgaaaaactgcagagtccacagatgagtgccagaaatctgatccgccagtcgaatgtgacactgatctgcacaacggatgatccggcagatgatctaagatggcacaaacagttaaaggaagacgattcttttgaagtgcaggtgcttcctgcatggaggccggatcttgcaatgaagatcgaaaaacctggatttgcggcatatatgaaaaagctgggagaatcagcggacatggaaatccgttcttttgcagaaatgaagcaggctttgacaaaacgtatggaattctttgacgaaatgggatgccgtgcatcggatcatggactggactatgcgatgtatgttccggcttcagaggaagaagtagaaagaatctttggaaaagggatggcaggagagccaatcagtaaagaagaagaattaaaatataaaactgcatttatgctttatgcaggaagagaatacaatcgtcttggctgggcaatgcagcttcattacggatgtaaacgtgacaacaatgtcaaacgttttcagaaattgggaccagatacgggatttgactgtattgatacctatacaccatcggcacagctggcagatctgctcaatgcactgaatgtgacagacgagctgccaaagacaattttgtacagcctgaatccaaacgacaatgcagccatcggaacgatcatcggatgcttccaggatgccggcgtggcaggcaaaatccagcagggaagcgcatggtggtttaatgaccacaagcagggaatgatcgatcagatgatatcccttgcaaatctgggacttcttggcaattttgtaggaatgctgactgattccagaagtttcctgtcttatacaagacatgagtatttcagacggattctttgtaacctcatcggaggctgggtagaaaatggagaatatccggcagatgaagagatcctgggaagaattgtgcaggatatatcttacaacaatgcagtaagatattttggatttgaggtataaataggggaaggaaggcagacgcgtgtaagcgattgccttccttcttctcatattatcccataacaatctcaacctgatattctcgcacatccttttgcggtgtgatgcagttggattcacagggaacaccgtttacagtcatttgtacgataccagattccacatggtttggattgcagatgtggatgtggtagacggcatctctgaattttcttgtcacggtaaattccccaagactggatggaatgcacggatcaatggtcaatccttcaaattccggacggattcccagaatatactgggatacattgacaaaggtccatgcagcggttccggtcagccagctgtttttggcctctccgtgtttcggagcatcttttccggcaatcatctgtgagtagacatatggttctgtccggtggatctcgctgatttcttcaatatatgcgggacaggtctttttataaatctcgaacgctctgtttcctctgcggattcttgtttcggcgatcgaaatccatggattgttatggcagaaaattccggcattttctttgtatcccggcggataagaagaaatttctcccaggtttaagtaatattttgtataggcaggctgctgaagaacaattccgtatttagtatccagccatgtttcgacactgtccagtgcctgttttgcacatccttcctcaattccgatatctgcaagcacgcaaaatccctgtggctcgataaatatttttccttcttcacattcacttgatccgactttttccccgtatgcgtcataagcgcgcaggaaccattctccatcccatccggtatccagtacggtctgatacatcttatctacggcagcaagtgcgcgtgttgcttctgcacgatttccgagaagtttctggatatcagcgtattcctttccgtatttgacaaacattccggcaataaacacagattctgcgacagggccttctgatggtccgaaagtctggaaagattctccgggttctttggaaaaacagttcaggttcagacagtcattccagtcggcacgtccgatcagcggaagtccgtgcggtccaagatgagtcagcgtgtagtcaaaagaacgtttcaaatgttcggctaatggctgggccagggtcggatcattgttaaagtctaccatttcatccagaatgctcagatcaccggtttcttttaaataggcagcagttcctgcaatcagccagagcgggtcatcattgaagccacttccgatattagaatttccctttttagttaacggctggtattgatgataggcacttccatcttcaaactgtgtggctgcgatatccagtattctctggcgggcgcgatccgggatcagatggacaaatccaagcagatcctgacaggaatcccgaaaacccatgccgcgtccggttccggattcaaagtaagaagcggaacgggacatgttaaaggtaaccatgcactgatactgattccagatattgaccatgcggttaagtttttcctcattgctttctacagaaaaacgggagagcagatcagaccagtattcttttaaggccagaagcgcagcctccacctgagaatcctcagaaaaccgggagatggcagcatgtgcaaggtcctttttgatgatgccgggtgcctcccatttatcttcaggatcgttttcactgtaaccgagtacaaagatcagatttttggattcaccgggcttcagtgtgagcttcaagtgatgagatccgatcacagcgccgccgcttgcaacagagttgtgagagattcccgcgtacacagtctccggatgttcgatacttccgtatactccaagaaaatcatcccggctggtgtcaaatcctgcaaccggtgaattgactgtgtagtatgcaaaatggtttctgcgttcccgatattctgttttgtggtaaatggtggattcttcgacttctacttcgccaaggcttaaattccgctgaaagtttgtggagtcatctactgcattccagaaacagaattctacataagaagtcagatcaatagtctcctcggttgtattgtgattggtgaggatcagacggttgacctcgcaggattctttcagcggcacaaaagcagtaagctccgcctggattttgtttttagaagcagtaaaacggctgtaaccaagtccatgacggcattcataactgtcaagctctgttttgacaggctgccaagcgggtgtccagactgtattgcgatgccggataaagtaatagcggccatctgtgtcagcaggaacattgttgtagcgatagcgtgtcaggcgaagcagctttgcatctttatagaagctgtatcctccgcatgtgttggaaatcaaagagaagaaattctcatttccaagatagttgatccacggaagtggagtggcaggagatgtgatcacatattctttctccttgtcatcaaaaaatccaaatttcatgttgttttcctccagtttgttcttaatttatgcttcagaacctgagtgtccatctgtttccagtgcgttctcaaaaggttcaaagactttaatcagtataaaagactgacagtatgcgatgaatgcaaatccaaacaataccatcagaagtttcatcggtgccagaaacaggcagaaaaagaataccagcgcgtcgatcaggagcagaaaaagtgttgcttttacatgactcattgtcagacagaatgcattttgaagtgtctgctttgttgtattttcaaaccgtgcgatgagcggaaatgtgtatgtaaacacaaagaaccaggcaatacatgcaacaaataaaagtgcgctgatcacagtggcaggaatggttccgaatgtaaaccagaacaccagattaaacagaaggagtgctccggctgcaaaaagaatcaggaaagcttttgttccggatttgaaatttttcttaaattcctgcagataggtgcggaccagatatccatattctccgcgggcttctttcatggttacacaatataacgaagaaagcgctgctccgatcgtaaagacagggatacaggtaatcagaaaaatgagatttaaaacaataaaattgcagagtgtgttgataaaatccaaaacaggatttacaagttttgtattcataaaaatgaagaccgtcctttctttctatctgatacttgtactatataaaggagaaagaaaaataactactggaaaaaaacgcaccaaaatacagtgaaaaatagagatttccgggggaagtgtgaaaaaaatctaatttaagcatgaaagaagtgtaaatttttagggtatttatcttgaaaatgaaatgataggataaatccagacaagcaaagcagttgagaacaggaggttagagaaatgaaaaaaggagggactgctgtgagaagcaagagttcaaaaagagcgaaagatcagcgtggatttaagtattttctctggatcttaccatttttgattctggtatttttattttcgtattttccattgcatggatggatttacgcattttttgattacaaaccgccaagaagcctggcagactgtgattttgtagggctgcagtggtttaagatgctctttacaaacaaaacacaggtgacacagctgctccaggttatgaagaatacgtttgcgatgagtttccttggaatactgacatctattcttccgcttggatttgcaattttattaaatgagatcaagtgcaaaaagttcaagacgtttgtgcagacgtttacaacactgccgaactttatcagctgggttctcgtttattccgtagcatttgcactgttttcttctacaggtatggtaaacagtcttctggagaatctcggagtgatcacagaaccactgaagtttctggacagtgattctcatacatatttatggatgcttctgtggaacacatggaaaggactcggatggggagctattatctatctggcatccattgcggggatcgatcaggagctttacgaggcagccagtattgatggagccaaccgttttcagctgatgaagaacatcacacttccggcacttctgccgacattctttattatgctgatgctggccatctccaactttttgaacaacggactggatcagtattttgtattccagaactcgtttaataaagaacacattcaggtactggatctgtatgtatacaacattggtatgacaggaagcagctattcgcttgcaactgcgatcagtatgctaaagagtatcatcagtgtagcactgctgagtgtatgtaactttgtgtcaaagaaaacacgcggcgaatctatgatttaggagggagataaaatgagtcagataaaagcaaaaagaaaaaaactctctgccggtgataagacattcaatgtgttcaattatttgttattcggggtattcacactgatctgtatctatccattttattatatgatcatcaatacgatcagtgccaacaatctgagcgcatcgggtgcgatcaactttctgccgcaaggcgtgcatttgagcaactataaagcactgttggagttaaatggtctgggaagtgcagctcttgtatccataggaaagacggtcatcggaacagcacttactgtaatggcaacagcatttctgggatttatgtttacgcaggaaagaatgtggaagcgaaaattctggtatcggtttgtagttattacgatgtatttcaatgcaggtctgatcccgatgtttatcacaatgaaaaacttaaatttgacgaacacattctgggtgtacgtgatcccgacgatcattcagccgtttaatatcattctggtaaagacttatgtggaatcacttccaagagcgctgcaggaggcggcagagattgacggagccggtatttttaaaattttttataaaatcattttgcccacatgtacgccgattttagcgacagttgcaatcttctcggcagttggacagtggaataactatcaggacaccctgatttatattaccgatcagaaattgtattccctgcagtatttgctgtatacttatatcaatcaggcaagctcgctggcggcaatggtaagaaacagtggtacagcggcgatcagtacggccgcacttgccacacagcagacaggaacatctatccagatgacagtatccgtggtcgtggtacttccgattctgtgcatctatccgatgttccagagattctttgtaaaaggaatcatgattggttccgtaaaaggctgatattttgcaggacaatagaaagtaaaggagaacaaagaacatgaaaaagagagtgatcagtgcatttttatgcaccgtaatggcagtgtctctgctgacaggatgcggaagtgatgagaagaaatccgcagacaataagggatccaaagatggaaattatgaagaatttatcacagtggatgtgtatgatgagtttgccaattatcagggagtacaaagcggctggtttgcaaaaatcgtaaaagataaatttaatatggaactgaacattatcgcaccaaacgtggcaggcggcggtcagacactgtatcagactcgttccgcagcaggagaacttggagatctggtgttagtcaatacttccaacggaaagttaaatgacctggtctcttcaggactgatcatggactgtacagacctgatggatggaaaagatattgtggaaaattacggagaggctattgatgtgacgaatgaaggtcttccggaagaaggaatgtttgcattcccgaactctgtatctacagatgcggctacagagtcaagcgagggactggaaccgacattcggaccatatatccgctgggattactacaaagaactcggatatccgaagatggaaaatctggatgattttctggatgtgctggaggatatgcagaagctggcacgtgagaaagaaggcagcgaggatatctatgcaatttctctgttcaaagactgggatgacaatatgatgaacaatgcaaaacagccagcttgcatgtatggatatgatgaagtaggatttgtactttccaaggcagacggaacagaggaacagagtattcttgatgatgattcgatctatatggacgtacttgatttcttctatgaggcaaatcagagaggattggtagatccggattctacaacacagaactatgatacatggtctgcaaaatatacagatggcaaggtgctgtattgtccatggccttgggttggacagaatctgtataatacagcagaaaataaagcggccggaaaaggatttatgatggctcctgtagaggatatgcagatcttctcctacggaagctgtccggaaggaaactctacacaggtgatcgcaatcggaagcaatgcagaagatccgcagagaatggcagattttatcgactggctgtattctccggaaggaatcgaactgaacggtcaggcaaacggagcggcaggtattaaagggctgacatgggatattaacgaagatggaaaaccggaattgacagatttcggaaaaaaagctctcccgatgaatgacgtagcggtagatgaagaatatggtggtggaaactggaaagacggtgtatctgcactgaactttaagacagtgaatttgcaggacattgatccaaatacaggagaagcttatgactatctgacatgggagacaactttggaagataataaaacggcactggatgaagactggagtacatacatgggcgcagatacaaccatggagtatctggaaaagaacgataaaatccttgtagcaccgggctcttcttattcagtaccggaggcagattccaatatcacaacagtgcgtggacagtgtaaatccgcaatcgtagatggttcctggaaaatgatctttgcaaaagatgatgcagaatttaacagtctgaaaaaagacatgcagaaaaccgcaaaaggtctcggatatgatgacgttttgaaagtggatatgaaaaatgcggcagatcagacagcagcaagaaaagcatccgcagaaaaatatccggctgaaagtgatgctaaataaacagaagaaagtaaataaatagtttcgcaggaatgtcctgagagggatgtctcaacaaatgcacagttgttatgatttgaagacagttctcccgggacatttttgcatggaggatgaaatgaaatacagcaataaagtaaataaaattgtttatggcggagattataatccggagcaatggccaaaagaagtgtgggaagaagatatgaagcttttaaaagaggcacatattgatattctgacgttgaacgtgtttgcctgggcatctctgcagccatcggaagaagaatatgatttttcgcgtctggatgaaatcatggaactggtcggagatcatggattttcagtctgtcttgcaacatctacggcggcacatccggcatggatggcaaaaaaatatccggatatcctgcgggtagagtttaacggaatgaaacgaaaattcggaggacggcataattcctgtccgaacagtccgacttaccggaaatattctgtaagactggcaaaaaaactggcggagagatataaagactgtgacaacctgatcgcatggcacatttccaatgaatacggtggagagtgttactgtgacaattgtgaaaaagcgtttcgtgtatggttaaagaaaaaatacagaaccatagaggaactgaaccgggcatggaatacttcgttctggggacacacgttttatgaatgggatgagattgtgctgccgaatcttttgagcgagcattttgagtatgacagaagtcagtttcaggggatgacccttgattataagcgttttaattcagagagtatgctggaatgttacaaaatggaatatgaggcagtcaaaagtgtcacacccaatctcccggtcactacgaacctcatgggattttataaaaatctggactataagatgtgggcaaagtacatggatgtggtagcatgggataattatccggcaaatgaagatacaccggcacagattgccatgagtcatgatttgatgcggggaatcaaaggaggagctccgtttttgctgatggaacagactccaagtgtgaccaactggctctcctacaatgccctgaagcgtcctggtgtgatgcgcttgtggagctatcaggcagtggcccacggggcagactctgtgatgtttttccagatgcgccgttccattggagcctgcgagaaactgcatggagcaattatcgatcatgtaggaacgaaccagacacgagtgtaccgggaagcacaggcgttgggggaagagctggagcgaatcggagaggagatactgggagctgtgacggaagcagaagtggctgtgtattttgactgggacaactggtgggcgatcgagtgttcggcaggcccaagctgtgagttgaaatataaagacgaagtgtatctttattatgaagcgttgcatagcctgaatattccggcagatatcgtgggggaagaagacgatctggaacactataaggtgctgatcgcgccgattctctatatgacaaagccgggatatgatgagaagatccgcagatttgtggaaaagggcggagtgttcgttaccacatttttcagtggaatcgtggatgaacatgatctggtgatcactggcggatatccgggcaggctgcgcgatattctgggaatctgggtggaggaatcggatgcgcttccgcatggtgttcagaatgaattttcgtatcaggggatcgtttatcctgcaaaactgctctgcgatctgagtcatccggaaggtgcagaggttttgagtacttacgagaaagatttttatcagggaatgcctgcaatcacaaaaaattcttttggcaaaggagaagcctactatgtagcgactcgttctgacagagcgttttatgagaagtttatcggaacactctgtaaggaggcgggaatccggccggtggcagaaccacagaaaaaactggaggcaacaatacgaagcaatgaaaacggaagatatttgtttctgctcaatcatggagaagagatgctttctgtcattttagaatacagtggaaaagaactgctttcaggtaatacgtatcaggccggagaaaaagtaaagcttctggcgaaaggcgtttttattttgaggctgcaggaataggaaaggagcaaaagatatgacatcacaggaagaacaggcatatttggaagaaattgaacgcgtgatcaaagcaggcccgtatcacgcagattggaattcactgacagagtggagtgctccggactggtttttgcaaaagcggtttggaatttttattcactggggactgtatagtattgcagcccatgctaatgagtggtactccagaaatatgtatatcaaggaaaaagaagaatgggagtatcacaggaagacctacggagaccacagggagtttggctataaagattttattcccatgtttacagcagaaaagtttaatcctagagagtggatgaagctgttcaaagaggctggggcaggatatgtgtttccggtggcagagcatcatgacgggtttcagatgtataagagcaggatatccagatataatgcatgggatatgggaccccacagagatcttctgggagagttgaaggaagcggcagaagaagagggattagtattctgtacatcgtctcaccgggcagaacactggttctttatgggacatggaaaagaatttgacagcgatatcagggagccgttacagaagggggatttttactggcccgcgatgccggagccggacaatcaggatcttaggagcaacccgtatccgacagaagaatttctgacagactggttgcttcgaacctgtgagatcattgatgaatacaggccatctttgttgtactttgactggtggctgcagcatgaggcgtttaaagaggtgctcaaaaaactggcagcttattattataacagggcggtacagtggggcaaaaaagttgcgatctgctataagcatgatgcgatgatgtttggaagcgggatcgtggaagtagaacgcggtgctcttgcagaggcaaaaccgtatgtctggcagacagatactgcgattgcgaaaaattcctggtgctatacagatacgctggagtacaagacgagcagacagatcatctgcaattttattgaaatcctcagcaagaacggaaatatgctgcttaatgtaggaccgagaggagatggatcgattccggaagaggatatcaaaatcttgaaagaaatcggggaatggatgaagaaaaatgaaagcgctgtttcaggaagcagaccatggagaaaatccggggagggaacgctgcagatcccggaggggcagtttacagataatctggagcttccttatacaaaagaggacatccgttttacagtcaaaggagacagcatatatgcgtttgtaatgcagtatccggaggatggagtacttacgatccgttctctggcagactccaaagatcagaacgtgccggaatttcatggtctgatcgagcaggtccgtgttcttggatttgacaaagcgaatgtacagtggaaaacggacagcgaaggattgcacctgcagattcagggtgtgaagacagatctgcctgcagtgcttcggattcaggtaaaataagagcggaaaggatgaaaaaaatcatgggaacaagaattctgtttacaggagacagtattacagatggaaatcgttataaagaagaaaaggacagaggagatttaaatcatcagatcggacacagctatgcctatgtgatcaatgcgattctgggaaataaatatcccgaaagggatttgcagtttgtgaatcgtggaatctcaggaaaccgggtaatcgatctgtacggcagaatgtatgaggatatggtggagatcaagccggatattgttagtattcttgtgggagtcaatgacggaccgcaggcagaacatgctcgccatgcgacaggaaaagaggcgtatgggacaatctaccggatgatgcttggggaattaaagagggtactgcctgatgtaaaaatcgtgctgtgtgagccgtttatgggagcagacggccctgtttatgatccggataaagaaacgtggagaatatgcatggaagcgtatcagaaagaggtaaaaaagattgcggaagaatttgatgcagtatttgttccgcttcaggaggtattcgacgcggcttttcagaagcgggaatcctcatactggatctgggatggggtacatccaacggagaacggacacggtctgatcgccgaacagtggctgaagtgtacaaaagaattgttaggaggcacagaacatgagaatcacaaaatataactcaatgaatgacattttggcatatccggatatggaaaactatctgcgcgtgttttactccgaatatctgctggatatgtatccaaaagaagcatatcatctgccgcttgcacgtatggagcagataggaaagactccgtggggagagccgttttcgatcatagtagatcagttgatcgatgcagtgaatctgattctggatctgcgggaaaatgggacgcgcagagcaatctccctgtggaatgaatcagaagactggtcccttaaaaaggatcgaaaaggagaaaaggaatccgtctttttgctggcgccagataacatcacagaagaagtcagaaaaaagagacgtcctgcggtcattatctgtccgggaggcggatattgtgaagtctgcttcagcggagaaggaacgccgatcctgaattatatggaagcgcagggatatgcggcctttattctgaaatatcgggtgtcaccggctgtctaccctgcgccgcaggaagatctttctctggcgattcgctatgtcagggagcatgctttggaatatggtgtagatccggacaatatcctgacattaggagcatctgcgggagggcatctatgtgcatcgcaggcagctctggcaaaaagagaggaagaaaagccggataaggtctgtctgtgttaccctgtgatcagttttacggaagaaccacatgagggaagcgcagagctgctgaccggaggagatgcgtctcttcgggagaagctttcggcagaaaatctggtgacagaatcttatcccgagacctttgtgtggacctgtgcggatgatgactgtgtgccgccttccaatgctgtgcggatgggagcagcattaaaaaaagcccatgtcagacatgagctttttgtatatcccagcggcggtcatggctgtgggcttgctttctcgaaagaagcccatgactggagtcgtgccatggtcgaatttttcaaagatcagcagtgatttttgcgatattctgcaggactggttcccacatattttttgaattttttatggaagtagtctacattgctgtatccaaccagatctgcaatttcataaaccttcagcgcattgtttgcaagcagctttttggcttcgtcaatacgcacggtatctacataggcattgaagttgatgcccagttttttggagaagatcttgccaagataagaactgttgtacccgaataagggggcaatactctccagcttcagattgtcccggtaattgtgatggatgtagtagagtacttcatccatcacattttcaccggaagaatatcccacagaatgcatccagagatcaaactgctctgccagaaacgtaataatttcatagagataatacttccgttctaacagatcgatcgcagaggcattggccagaaatgggatatcaatgtttggataagtctgcatgattttctgtttgaccagaatatacaggtcgatcatcatatgtttaatagaggtgatcggagcatctgtatatttcatggtatgtgacagttcttttaaggtttcggcaagcagagtctggttgtgagactggatataattggcgaatcgttctgcatagtcaggtgccgtctgccgtgtgaccggcacagattctggcagctctccgtacaattcctcatatcctacaatatgctggttctcttcacagaaaaagcgccggtcgcttaagcggcacacatcctgatacgaaagatggatgtcccggatacgggacactttctgtccgtaggcgagaaatacagaatcaaagggagagcccttttgcggcgcaatctgataatgccgaagcaggttttcaaatttggaaactgcaaaatcgccctttagcaggataatcttgcgctgatccagttcaatgatgtcaaaagtatgattgtcctggttggtaacacgcatcaggtcggcaaaattccaggtctgataaaaatattcctgattatagttctcgtaagagacgatctgataaatgttcgcattgagatgcaggtcattcgaatccagtttataataatcacaagtatccagcagaatctcttttaaaatactgtgttttgccttgttgcgatactgttcataggaagtctggctttgcgcttctttcaagatgagctcatggacagcagaaaccgcctgttccagctcatcctcatcgattggctttgtgaggtagaaatcgacaccgtaacgcatggcggtctgagccagtttgaaatccgtaacaccgctcaaaataataaactttccggtatagccggactccacagctgcctgtacaacttcaatccatgtcattttaggcatccggatatccagaaggacaagatccgggttcaggctcctgattttctcaagagcatcctgaccatcgcatgctgtctgacagatagtaaagccgagctgattccagtcgataatgtatttcaaaccttccagtacaattttttcatcatctgcgatcaaaacattcatgattcatcctccgttaaatttaatagtggaattgtcaatgtaatcagagtaccaaatcccgggcggctgtgcaaggaaagtccgtaagattttccataaaaaagatgcacccggttattgatattataaagtccgactccgtgatcggattccggctgcgggatatccagatgatcaatgacatccttaagtttttccggtgacattccgatcccgttatcaaatacatctgcgatcagaagatcatctttggatctgaaaatcttcaggatcacatgtccttcctttccggtgtcctccagaccgtgggagactgcattttcaatgatcggctggatcaaaagcgggaggatctgatactgcgtaagatccaggtggctgtcaatccggatcgtataattcagccgttctccaaaccgcattttctgaatggcaaggtaagtttttatatagtcaatttctttgtcaagcgtggtagcggtcgtcttcgtattgttgaggacatatcgcatggatttgccaagcagcttgatcgcggtggcaacttcccggtttccttctgcgaatgctttcatccgtatggtttccagcgtattgtagagaaaatgcggattgatctgattggccagaagtttgagttccatctgatgctgttggttcgagatcatctgctgtcggatctgtgtctcataaatctgagcttcgtttcgttttaatttttcgaccgttgtttttaaatctgaaaaaacagctgtcagttcatcgtccccctggatggagttgacaatttcataatcattgtgtgccacttttttcatggcaaggcgcagggtctggatccttgtactgaaatatcgggtgtacaaaagaatcagcagtcctgagattgagagtgaaaagatgccggcaagcagaaaactcagttttactttctgtatataagaaagtgcatcgcgggaggacgctacaatatggatggagtcctgggaggagcaggcgggcatcgtttgcacagaggcgatggtatcctcaccgaggatgcgcatctttccggtctgtgtataataagcagcatctgtctggatgggcagaggaaatgaattgccggtgtaactgcggtctgtactgaaaaatacaggatccgaattgactgctgcataaatatcataatcctcggaaggaatcagattgtgcagataatcattggacacgctcatcacaagaacagcataagaaccagtctgtggaatcgggatgtggcagtagtaattcagttcccagtacggaacatcaccttgtccggtgcgcagaccggacatccagaaattcccttttgtcgaggcagcacgtgtataccagtccatatgtctcacctcgtccgttacaggataaaaataagaataaggggtatcctgcttcaggacgttttcatctacatagagcttcagactggaaatcgcagtcatgtttgcaagtgcctggtcaaaacggccatactggtcaagcgcctgggtggcggcagcagaatccggataatcacaggcaagcaggttccagagatatctgtctgtagaaatcgattcacagatctcgttcagataaagggtcgtgctgaccagaaccgaacggacctgggtggcttttgactgactgagatgttcatagttctgcgtgatctgccgataggaatacagataaatgattccgccgattataaggatcggaatcaggatggtgcagataaacagcgtcatcagctgtttgcctacattttgtctggaaaaaaagttctggtataatttcgtcaatctcatagtgttactcctgtcaaatctataaagaaacaatatttactattataaagcataattctttcaaagtgcaaataatcacggaaaatttgggtatttttgttccaaaaagtacggtatgaatacggagataaatttcctataatggggaaaaagaggtaatgaattttggaaatacaggaggaacgagaaaatgaaatttcacaatggatgttggttgtttaaagaaggatatgaatgtttttcccctcagcatgtatatgaagtaagaaagagtgaacaggaagttgtgctgtgtgcgccaaccggccggatcaatcataagggagatactctgggcggaatcaacctgacggtcaggatcacggcgccgatgccggaggtgatccgtgtacagacattccatcatatgggagttgttgacagaggaccgaagtttgaactggagttttcaaatgcagagggattggaggcagaagagacagagaatctgctgacagtaagaagcggacatttaagtcttgtgatcgataaggaaaactggtctatgcgctatgagagagacggagagcttctgacaaaaagcggatggagagacctttcttatttgaaaacagactggaaagggtttgcttatgataaaggaagcgaagatgcttatatgcgtcagcaactggggctctctgtagatgaactggtctatggactgggagagcgttttactccatttgtgaagaacggacagagcgtggaaatctggaatgaagacggcggaacaagcacggagcaatcctataaaaacattccgttttatctgacaaacagagggtacggagtgtttgttaatcattcggaaaaagtagagtttgaagtggcaacagagcaggtaacaaaagtcggattcagtgtcaaaggggaaagtctggattattttgtcatcaacggtccgaagatgaaagatgttctcaaacactacacagatctgacaggaaaaccatctcttccggcacagtggacctttggattgtggctgtctacatcctttacaacagattatgatgaaaaaacagtcatgagctttattgacgggatgtttgagagggggatccctctgagtgtgttccattttgactgctgctggatgcgggaattccactggacagactttatctgggacgagagagtgttcccggatccggaaggcatgcttcggcggatcaaagagaaaggggtgaagatctgtgtatggatcaactcctatatcggtcaggaatcagcactgtttgaggagggaatgcaaaaaggatatttcctgaagcgtgcaaatggagatgtatggcagtgggatatgtggcagccggggcttgccattgtggatttcacaaatccggaggcgacaaagtggtatcagagcaaattaaaaatgctgctggatatgggagtcgactgcttcaaaactgattttggcgaaaggatcccgacagatgcagtttactataatggtgcggatccggtgaaaatgcacaattactatacatatctgtataataaagcggtctatgaagtgctggaacaggagaggggaaaagaagaagcaattctctttgcacgttctgctacagcaggcggtcagaaattcccggtacactggggcggagactgttggtcagactatgaatccatggaagaaagcctgcggggcggcctctctctgacgagcagcggatttggattctggagtcatgatatcggaggatttgagagccagtctacaccggatgtctacaaacgctgggcagcatttggacttctttccacacacagccgtctgcatggaagcacttcctatcgtgtgccgtgggtatatgatgaagaatctgtggatgtagtgagattctttacccgtttaaaacttcatcttcttccatatttgtacagcagcgcggtgcatacatcagaaacaggagttccgatgatgcgcagtatgatgctggagtttgaagaggatatgaattgcagatacctggacaaacagtatatgttgggagacagtctgcttgtatcaccggtattcaacgaggagggaattgcacagtactatctgccgcagggaaaatggaccaatcttttgacaaaagaagtgtcagaggggggatgctggagaagagagcatcatgattatctttctgtgccgctttgggtaagagaaaacagcatgattgcacagggaattgaagcagaaaatgcgtcctattcttttaaaaacaatctggagctgcaggtatttgagctgcagacggaggcaaaaaccgtggtataccagaatggacggccggtatgcagtctgtctctgaagaaaaatggagaaaaaatcgaaggagtcctgcagggagaaggaaacgtgaaaattcgtttcgtaaacaggaaacttcgggcagtacagggagccgatgttaagatcgatggaaatgatacggtcataacaatgaaagcaggagaatttgtgtgtgaggtgtaagatgagaacagaaaaagaacaggcaatgtggacaaaagcagaagaactgacggcgaagctcacactggatgaaaagatcaagatggtgcacggggcagagctgtttcagacgaaaggggtagaacgtcttggtatccctcctctgaaaatgtctgacggaccgatgggagtccggcaggaatttcatccggcaggatggaaaccggtggggcattcggatgattatgtgacatatctgctgtgcaacagtgcgctggctgctacctggaatcggcatctggcgtttgagaccggatctgtacttggtgaagaagcaagaggaagaggcaaggatgtcattctggctccggggatcaatatcaagagaagtcccctttgcggacggaattttgaatatttcagtgaagatccatatctgacaaaagagctggcagttccgtttatccagggagtgcaaacctgggatgtggcggcctgcgtcaagcattttgcagtcaataaccaggagacagagcgactctgggtggatgtggaggtagatgaaaacgcattgcgccaaatctatcttccggctttttatgatgcagtcaggcaaggacattcttatacgatcatgggagcctacaatctgcttaagggagaacactgctgtcaaagtgagtatcttctgaaaaagatcctgagagaagaatgggagtatgacggtgtagttatctcagactggggggctgtacatgatacagatctggcggcaaattcccagctggatattgaaatgtcagtaacagataactttgatgagtattttatggcagatccgctgaaagaaaagatccaaaacggagagatcaaagaagaagtgctagatgagaaggtgacacgtattcttgtgttgatgatgcggcttcacatgataggggaggaagaacgaaaagccggcagctataatacgccagaacaccgtcagaaagcattggagaccgccagagaatctgtggttctgttaaaaaatgaaaaccatattctgccattggatcccgcagcggggaaaatactggtgatcggggaaaatgcggaatgtactcatgcaaacggaggaggaagcgccgaaatcaaagcattgtatgaaatcaccccgttaatgggaatcaagacactgcttggaggcaatgccgaggttcggtttgtacagggatatgagcgaagtgaagagaacgatatgacggatacaaactggcaggaaaccagtctggaaaacggcggtggttcgactgctcagttccgggagtcagaggaaatgtcagataggagagccgcacttcgaaaagaggctgtgcagctggcaaaagagtatgatcatgtaatcttcgtgggcggactgaatcatgaacatgacagtgagggaaatgaccgggcagacatgaagcttccatatgagcaggatgttctcataaaagaactgcttttggcaaacccggagacagtcatcgttatgatgggcggaagtccggtggaaatggggacatggatcaacgatgcatctgcggtggtatggaactggtatgcgggaatggaaggcggaagagcactggcagaagtgttgtttggccggatcaatccgtccggaaaactgccggagaccttttataagaaacatacggactgttctgcgcacgccatcggagaatttccgggaggaaaatctgtgcattataaggaaggtgtgtttgtaggctatcgctataatgatacctttgagatagaaccgcagttttgctttggacatggactttcctatacaacatttgcgtattcggatgcaaaagtacagcaaaaagacgggaagatggaaatttcctgtaaagtaaaaaatacgggaactgtttttggaaaagagactgttcaggtgtatctggcgccgaaggaccgaagaaaaaatcagccgcttcaggaattgaaaggatttgagaaagtggcgttggaagcaggggaacagacggaagttgtgattttggcaacaggaagtgtaaatgaatatgaaatccggattggaagttcttccagagatatccggctgacaatataggaagaaggtgtgcgtatggaatatcaaaatccgattctgccgggatttcatccggatccgtcagtgtgccgggtgggcggagatttttatcttgtcaactccagttttgaatttttcccgggagttccgttgtatcacagccggaacctggcagactgggaactgttgggatactgtctgaaaacggaagaacagctgaatctgaaagaggcacatgcttccggcggaatttatgcaccgacgatccggtggcatgaaggcgtcttttttatgacaacaaccaacgtatctgatcggggaaattttattgttcatacccgggatctttctgaggggtggtcagagccatgttgggtagagcagggagggattgatccgtcgttgttttttgatgacgatggaactgtatattttttatccacggggaacagacaggatggtacgtgcatgatccagatgtgtgaggtggatccattttccggaaaacagctgacaccaagcatagaaatcagtcttggctgcggcgggaaatttccggagggaccgcatatttataaaagagatggatattattatctgatgctggcagaaggcggaacagagtacgggcatatggagacgattcagcgagccacaactccatatggtccatatgaaccatgtcctcacaatcccatcctcacacatcgggatgacagcagaggagaaattttctgtacgggacatggagatctggtggaagatcagaatggaaactggtggatggtctgccttggaacccgatgcctgcatggggcgtatgcaccattgatgcagcaccatcttggaagagagacctttctggctcctgtgatatgggacgaagatggatggccggcagtgggagaaaacggaaaaatttctccggtgatggatggaccgcttccggctccgggtcagccggggaaatgggatgaatttgtggattgctttgaagacaaaaactttgatctttgctataattttctcagaaatccgaagatggagcagtatgtaagagattcgcagcatggtgagctgctcttaaagggaaatggaatatccttaaatgacggaaaaaatccgacttggcttggaatcaggcagagcgaaattcatatgtgcgcagagaccattctgtctttaaagcagaaaacgggaaaggcgctggcaggtctgactgcgttttataatgagaactaccattatgaaatttatctgacaagagaaccggaaggctgttttgtctgtttggcaaaacatgtacatgatatttttgtggtaacagagaaaagaaaaatagaatctgaccagaagatacatttatggattgagtcggatgaacagcagtatcggttttattatggtctggatcaggaagaacgagagctgctgggaacagcacttccttccggtctggcatcagaaggaacctgtaccatgacatttacgggaacttatatcgccatgtttgcagagtgcggggaagcagcgtttcagtattttaaatgtaaatttcagaggggataaaaaatgaggaaagaatcaaaaacaggttctttcctcattttttgtgaagttcagattcgatttaatttcccagttcattctgaatgcgctgtttggtatccaggatcagatgtgtaaactgttctacccgggcatcgtccattcggtcttttggtgcagatacactgatggcataagccggttttcggtgaagcccttttaaagataccgcaatacatcgaactccaagttcattttcttcattgtccatggcataaccgttcgtccgcacttctgcgatcagtttctgaaattccgggaaatcaatgacagtatagtcggtcagttttttgatctcgctgcgatcccagatcttctgaatcttttcatccgacatgtcagccagcagcgcttttccaactccggagcagtacaaaggaattgattttccgaccatagagattaaccgcacggaattatgggaagcctctactttatcaatatatactgcattcagaccatccagctggaccaggtggaccgtttcattggtctgttctgcaagttctttaatgtaagggcggatcagatcgatgatattattctgggccagaatctggttggcgattccacagaatttaaatgtcagactgtatttcagtgtctccgcatcctgctttgcatattccatacagatcagggagtttaagatacggtggacggtacttttattgagatttaattccttgctcagttccagaagtccgatcggaccggtgcgggcaagacattctatggtatggaaaatacgttccgatacctggattgggtttttttcttccataaaattcactcctgtaaagtcagagctcaaaagagcgccgtatatcattcagtgcttattgtagcacggtttgggaagaagagtaaataagaaaataacaaagtaaaaaaatgtgaagaataccttgacaatcgagagaaactgagtataatcaaaattaaagagttcatattacgaaacgtagttccataatgtgaaactgacaacgtgattcagtgataaggagaatgaccatgaacgaagtattagaaaagattcagaaaatcgggattgttccggttgttgtattaaatgatgcgaaagacgcagcgcctttggcaaaggcactctgtgacggcggacttccatgtgcagaagtgacattccgtacagaagcagcagaagagtctatccgcattatggcagagcagttcccacagatgctggtaggggcaggtacggttctgacaacagagcaggtagaccgtgcagttgcagcaggagcaaaattcatcgtaagtcctggattaaatccaaaggttgtaaaatactgtattgaaaaaggagttccggtgacaccgggaacagcaaatccaagtgatgtagagcaggcaatcgagcttggactggaagttgtaaaattcttcccggcagaagcagccggcggactgaatatgattaagtccatggcagcaccttacacaaatatgaaatttatgccgacaggcggaatcaatgcaaagaacatcaacagctaccttgcattccctaagattctggcatgtggcggaagctggatggtaaaaggagatcttgttgcagcaggagaatttgataagattacagagctgacaaaagaagcagtgatgacaatgcttggatttgagctgaaacacatcggaatcaactgtgaaaatgaagaagaggctgagaaaacagcaggaacattcgcttctttattcggatttgagaagaagagcggaaacagttctgtatttgcaggaagtgctgtagaagcaatgaagagcccataccttggagcaaaaggacacattgcagtaggaacaaacagcgtagatcgtgcagtaaattatctggagtctcagggcgtagagttcaatatggacagtgcaaaatacaaagacggaaaacttacagcaatttacttaaaagaagaagttgccggatttgcagtacatcttgtacagaaataaaaaatcattaaaggagaataataatgagtaaaaaagtagttacatttggagaaattatgttaagacttgcaccagaaggatattatcgttttgtgcaggcagatacatttggagcaacatacggcggtggagaagcaaacgtagcagtttctctggcaaactatggatttgatgcttctttcgtaacaaaacttccgacacatgagatcggacaggcagcagtaaattctttgagaaaatacggtgtggatacatccaagatcgcacgtggaggagacagagtaggtatctacttcctggagaaaggtgcttctcagagaccatctaaagtaatttatgaccgtgcaggttcttctatctatacagcatccaaagaagatttcaactggaaagagatctttgaaggagcagaatggttccactttacaggaatcacaccagcactcaatgacaatgtagcagaaatctgtctggaagcttgtaaagcagccaaagagatgaatgtgaagatttcctgtgacttaaactacagaaataaactgtggagcaaagcaaaagcaggagaagtaatgggtgaactttgcaaatatgtggatgtatgtattgcaaacgaagaagatgcagcagatgtattcggtattcatgcagcaaacacagatgtaactgcaggagaagtaaatcacgaaggatataaagatgtagcaaaacagcttgctgaccgtttcggatttgagaaagttgcaattacacttcgtgaatctatttcagcaaatgacaataactggtctgctatgttatatgacggaacagactatttcttcagtaaaaaatataagatgcatatcgtagaccgtgtaggtggcggagatagcttcggcggcggattgatcgctgcaacactgagcggatatgattcacaggctaccattgaatttgcagtagcagcatcctgcctgaaacactccatcgaaggtgacttcaacatggtttctatggatgaagttgccaaactggcaggaggagatgcttccggacgtgtacagcgctaagcacttttggaagaatataaataaataagccataatcgactattttgttgccaatataagaagctgtcacatgaagtaacattcatgtgcagcttctttttatgcaaaaaaagaaggattgacaatctgcagttcctatagtactataagcctataaaaccgaaacgtttcgtgtatttaaaaggaggaaagaaaaatgccattggtaacgtcggaaaaaatgctttcagatgcgcaaaaaggcgggtatgcagtgggagcattcaatgtggagaatatggagatggtaaaagcagtgatcgcagcagctgaggagacgcattcaccggttatgctgcagacaaccccatcaactgtcaaatatgggactttggagacattcgcaggaattgtaaaagctgaagcagagaaatcagagattccgatctgtcttcatctggatcatggcagcagttttgaattggctgtgcaggcgatgaaggcagggtatacatctgttatgatcgacggatctcatgagagctttgaagaaaatattgcgatcacaaaaaaagtagtggatgttgcaaaagcctatggaatcccggtagaagctgagcttggaaaagtcgggggaaaagaagatgacctggaggcagaagcagatacaaatacagatcctgcagaggcgaaagaattcacagaacgaaccggagtttcttcattggcaattgcaatcggaacagcgcatggattttatgcaggaaccccggtattggacaaagaacgggtatcggactgtaaaaaagtagtttctgttccattggtattgcatggtgcaagtggactcagtgaagaagatgtggtagaatgtgtacagcgtggaatgtgtaaagtgaattttgcgacggaattgcgcgtggcgtacacggatgcggtgaaaaaacttctggaagaacagccggaagtctttgatccgaagaaactggggatagcagcaatgaaagccgtgaaagaacagaccatactgcgaatgaaaatgtgcggatgcactgggaaggcataagaatccgcacagatgtagtaaggaaggcggaaatcatcaatgggagcgacgatgaaggacatcgcgaaaatgacaggattgggactggcaacgatttcttcctatttaaatgggggaaatgtccgggaacaaaaccggattaaaattgaggcggcaattgaggaattgcattttgaggtaaatgaggtcgcgagaggccttaaaacgaatcggaccaagaccataggaattattatccctgagttgaacaatattttctgtgcagaaatcatcacggaagtggaggatgtattgaggaacagagggtatgcgacaatgatctgtgactgcagaacagatgcagtgcgagaagcggaagcagtagaatttctgtttcggcgcagagtggacggactgattctgatgccctctggtaaatcaggaaaacatctggagcgcttttcgcaggccggaaaaccgattgtactgatcgatcggaatctggaagatatttcctgtgacagtgtacttgtggataaccggggggcagcggaagatgccgtaaagagacttcttttggcaggacatcggaggattggcatgatcgcaggtcctgagcatgtatttacggcaagagaacgatatctgggctatgaaacagcactgaaacaggcggggatcagacaagaggagtctttggttgtacatggcgattatacgatcgcaggcggtgccagagcgatgcagcagctggtagaggggaatccaaagataacagcagtttttgtatcgaattatgagatgacggtaggcgctatgattcagagcaatgaaatgggaatcaaaattccacaggaactttctatgattggatttgatgacattgagtttgccaaagcaagcaatccgaaattgagtattgtgacacagccgacgaaagaaatcggaagaaatgtcgcagaattgattttgaacagactggatgaagaatccaaagatatgcctccaaaagaaatcaagttaaagaccagttttgtagaaggaaaatctatacatgttttgtcgatgtgataaagtgtgaagggttttccctttatataccgaaacgtttcggaaatgtttggagggagcatgaaaacgtatttaataggaattgatattggaacaagcggatgtaaaatcgcagtatttaatcgaaaaggagaggttctggcggcacaaagcgggagttatccggtgtattacccaaaacccgggtgggcagagcaaaatcccgaagactggtggaacgtgatatgtgagttgcttcccgggatattgagaacggcagaagtactgccagaggaaattgcgggaattggaattgacgggcagagctggtcagccattgcagtggataaagacggaaaagttctgacaaatacgccgatttggatggatacaagagcacaggaaatctgtgatgaatggaatgaaaaaatcggaaaagaaaacatatttgcgttgtgtggaaattcgctgcagccgtcctatacaacgccaaagattctttggtatcagagatatcttccggaagtttatgaaaaaaccgaaaaaattttacaatcaaacagttacattgcatttaagctgactggaaacatgactcaggatgtatctcagggatacggactgcattgttttgatatgaaacatctggcatgggatacggatatgtgcaaggcatttggattttcgaaagatttgcttccggagatttatccgtgtcatgcagtgattggtacagtgacagaagcggcagcaggagcgtgtggactctgtgcaggaattccggttgtggcaggtggtctggatgcagcatgtggaacactcggtgtgggtgtgatccatgacggtgaaacacaggagcagggaggacaagcaggtggaatgagtatctgtatggatcattattgtgcagacgaacgattgatcctgggaactcatgttgttcccggacactggctgcttcagggtggaacgactggaggcggcggagtgatgcgctggctggaacaggagcttggtgactgggaacgggaagaaggaaagagacggggcatccattctctggatgtgatgaatgaagaagcagaatctgtttcggcgggaagcgatggagttgtctttcttccatatatgtcgggtgagcgctctccgatttgggatcccgatgcaaaaggtgtttattatggcctggattttggaaaaacaaagggacatctgattcgggcggccatggaaggcactgcctatgcgttaagacataatcttgaggtggcggaagaagcaggtgcgaaagcagaagtattaaaagcaatgggtggtgctgcaaactcgaaattgtggacacagatcaaggcggatgtgactggaaaaagaatagaggttccatcatcggatacagcgacaacacttggagctgcacttcttgccggagttggtgttggagtctatgagagttttgaagaagcagtagagcaaaccgtaggacggggcagagtacatattcccaatatggaattcaaacaagtttacgaagacagttacgaaacataccgaatgctgtatgaacagttgaaagagctgatgaaaaagacaggaggaaaaagaaaatgaaagcagcagtagtttgtgcaaatgaagatgtacaatatctggagtatgaagagccgacgccggggccgggggaggtgaaagtcaaagtgcgggcatcgggaatttgtggttcggatatcccaagagtacttcacaatggggtacatttttatccaattgtactgggtcatgaattttcaggtgatgtggtagaaattggagaaggagtgacaaaggtaaagccaggagctcatgtttcgggagctccattaaagccttgcatgaagtgcgaggattgtcagaatggaaatttctcactgtgtaaacattacagttttattggatccagggagcaggggagcaatgcggattacgttgtgatcccggagcagaatgcagttgtctatgacccgtctatttcttatgaacaggcagcaatgtttgagccttcgacagttgctcttcacggactgttacagaatgaatatcagggcggacagtatgttgccgttctgggcggcggaaccattgggatgttcaccatgcagtgggcaaaaatatttggttccagaaaagttgtggtatttgatatcagtgaagaacgtctggaactggcgaaacgtctgggtgcagatgcggtgatcaatacgacaaatgagaattatatgcaggaagccatggaacttaccggtgggaaaggatatggatatgtatttgaaacagcgggacagattccaaccatgcatatggcatttgagcttgcaggaaacaaggcgaatgtatgcttcatcggaacaccgcatgaggaactcacatttacaccggcaatgtgggagaatatgaaccggaaagagtttcatctgacaggttcctggatgtcctacagtgcaccgttccccggaaaagaatgggaattgacggcacattattttgcaacgggacagttaaagttcgatccgggatttatctacaaaaaggtaccgatgagtcaggcgcaggaggcctttcagatgttcaagactccgggattggtcaaaggaaaagtgttgcttgtaaacgaatcataaaatgagtggggagatagttgtaagatgatactgaccgtgacattaaacgcagcaattgataaacgctacgtggtagaaaaattctgtctgggggaagtgaaccgtgtgaaagagtgcgcatatactccgggcggaaaaggattgaacgtttcaaaacctgcggcgattgcaggagaagaggtaattgccaccggctttgtgggaggacatgcgggaaattatattgaggaggcattaaagcctttcggaattcaaagtgagttttatcatctggacgaggagagtcgttcctgtatcaatatctgggacgagacaaaccgtgtgcagaccgaatttctggaaccagggtttacggtaacagaagaacagttccggggatttttaaagaagttccatatgctggtaaaacaggcagatgtggtggcaatgtccggaagtgtgccaaaaggtctggacggaacggcctaccagcatctggtggaaatctgcagagcagaaaacaagaaggtcatcctggatacaagcggaaaactgcttaccatgggaattgaggcaaagccaacgatgatcaaaccgaatctggatgagatccggatgctgacgggaacttcctgtgacagtataggggagatgatcgaggcagcaaagcaaatccataaaagcggtgtggagatcgttgcagtttcactgggggcggaaggtgctctggtagtctgtgacgagggaatttatcaggcgcaggttccaaagatcgatgcagtcaacacggttggatgcggagattctatgatcgccggatttgcagtggggctgagtcggaagatttcaatcgaaggaagcctgaggctggcaagtgcgatctcagcggcagcagcccttcgggaagagaccggattttttgtaaaagaagatatggaacgtatttttaaagaagtgaaaattaaaaaagtaaaataaagaaagagaggaacaaaatatggcagaaatgatggatccggcaatggtgccgaaagtaaagttgtataccggagaagaaattccgtgtgtgggaatgggaacttttggttccgatcggtttacaccggaacaggtatcaaatgcggtggcaggtgccatccgatgtggatatcgtatgtttgactgtgcggcatgttatggaaacgaagatcagatcggagaggtattccatgcggcattcgaagaaggtgtggtagaaagaaaagatttgttcattatgacaaaagtatggaatgatatgcacgaacgcgtggaagaatcctgcagaaagagtattcaggatctgcagtgtgattatattgatatgttctttattcactggccgtttccgaactatcatgcaccgggatgtgatgtggattccagaaatccagattcgaagccattttctgtggaagagtttatgaatacatacaagcagtgcgaagagctggtaaagaaagggttgatccgtcatatcggaatttccaacatgacaattccaaaaatggaggcagtactgccgctgatggagatcaagccggcagcttgtgaatcggaaatgcatgtctgcttccagcagcaggaaatttttgattatctgatggcgcatgatattcagccgatcggatttatgcctcttggttctccacagagaccggagagagatatgtgtccggaagatgtagcagatctgcagacacccgaaatgaaggaaattgcaaaagcacatggatgtcatcctgctttgatcgctttaaaatgggcacatcaaagaggtcagattccaattccattttctattcatgagatggaatatgtaagtaatttaaaagcaatgacagaggatccgctgacagaagaagagatgaagaagatcgagacacttgagagaaacaaccgtcttgtgaaaggtcaggtatttttgtgggaaggcgcaaaagactggcatgatctttgggatgaggatggaaccattgtaacgttataatataagaagcagaaaaggcatgaaaaaatgaaatgctcttttctgcttttttaaaatagatctgttatgtatagtttgtatcaggtgttcatagaacgactttcatattgtatggtattcggaaatgtctgatcaaatttttactttcacaatacctggctttgttgtatactatgcataggaatttctgtggttgtgacagaagttataggtgggaggatacaaaagtgtataaagtgttgttggtagatgatgaaatcctcgtccgtgaagcaatcagtgcaaagatagaatggggacaactggggtatgaactggtcggtgattgtgagaatggaaaagcagcgattgaatttttaaaggaacatcctgtggatgtggtgctgacagatatttgcatgccatatctggatggaatgggacttagcaaatatatttatgaaaatatgccgcagacaagaattatcatttttagcgggtacagtgattttgagtatgcaaagcaggcgatacagtataaagttgcagagtacctgctgaaaccggtaacggcaaaggaactgacagaagtactgaccaggatccgtgaaaaactggacagtgaacggaccgaagaagagagaatagatgcattgcagaaggcatatcggacgtacacgaagaatgaagcattgatcatttcgaagacattgtcaagacttctgcaggggacacaggcaattgagacaagtatggaagaactaaaagaattcgggattgagttggggggagcttattaccgggttgtaacgacagatattgatgtgtattccagcttgtatgacacaaatgaagaattgaaaaaagaaagtgcgctgatgtcgtttgtagttgagaatatcagcaatgagatcgtcagtgatcataatgccggaattgcttaccgggattcggacagccgggtctgcatgcttttgtggagtgataatccaaaagagttcggacagaagatctatgaaatctgcagagaaattcagaaaacagtaaaagaagccatgcagttgagcgtttcgatcgggatcggaccatgtgtagaaaagctggaggatcttccaaaatcttacgaggccgctgtggaaactttgagataccgctacacaaagggcagtggacagatttatgattgtgaagctccgatggtatgtggaaatctgctggagctggagcaggactttaaagatattgaagaggcagcaaaaaaccaacagatggaagagatcatggacattttagagcatgtggagaaatgggtttgtcatggatatgtgaacaggaatcaggctgtttcatggctgcgtcagatcatgatgattctttatggtgtggtacacagagcaaatgaagactttcagatgaatgaaagagatcttggagaagtcatggaggcgagaagctttgctgtggccatgggaaaagtcaaagaatatgcaaaaaatgcaatggaagcaatggagatggcaggacagtccagtggagagcgctgggcgagacgggcacttgaatatctgaaagagaattatccgaatccggcgcttagtttaaatgatgtatgtgatcatttgaatatcagtacaagccgttttagcagtgtatttaaagaggctacaggaaaaacatttaccgaagctttgaacgggattcggatggagcgggcgaaacagctgctgagagagactagtctgaagaactatgagattgcagaaaaagtaggattcagtgatccacactatttcagcattgcgtttaaaaagagtacggggcagactccaaaagagtatgccagggagaattgatggatgaaacaacaggaaacgacgatatttggaagatttaagagtatacgggatgcgatgatgctctcgttttctgtgttggtagtagttgccgttttgattttccttttgattgccatgaattttacaaaaaaaaccatttacgagaattccagaacttcaacgtctcaattgattcgtcaggtgaattatgatatcgattcttatattgattatatggaaaatatttcatgggtggcagcaagcggcagtgatctttcccagtatttgtttaatcagggtctgacggcggaagaaaaagaagcggcaaaagaacgaatcttaacacagttcaatacgattctggaaagccgctctgatatctacaatgttgcagcagttgccaataacggagaagcgctgatcaatacaggggcagaccgtcttaataaatatgtggatgtcagacaacacagctggtatcaggcagcgctgcgttctccgactgggattgcagtgtcttcttctcatgtacagaatgcaattgcaggcagttatcactgggtgatcacgttaagcagggcactggtgaatgagcagaccggtgaacgagaaggtgtcttttttgtagatttgaactatagtgcgatcagcagtctgtgcagtaacacgtctatagggaataagggatatattttcatattggacgaaaacggaagtatgatctatcatccacagcaacaattgatctacggtggtctgaaggaagaaaaaatagaacagattctttctgcgaaaggaaactttctggagacagaagagggggcggacagtaaactttacaccatgtcaaagtcagagaagacaggctggacggtagtgggagcatcttatgtgacagagctgatgaaaaataatcagcaggcacagatgctgtatcttctggcagcagcagggattttgatcggggtaattttaatttccagttttatttccagagaaattacaaagcctttgagaaggctgcgggattctatgagtctggtagaaatgggaaatttcgatcaggcaagtgtggaaattacaacagagaacgagattggaagtctcagcaaatcgttcaatgcaatgacgcagaggattcatgcgctgatggaacagaatatctacgagcagaaacagaaacgaaaaagtgagatgaaagcacttcaggcacagattaaccctcattttctttataatacactggattcgatcatctggatgtcagaagccggagaaaatgacgaagtcgtgctgatgacatctgcgcttgcaaagctgcttcggcagagtatcagcaatgacagggagcagattacgattgcagaagagattgattatgtgcgaagctacctgacgattcagaagatgcgttataaagacaagctggagtatacgatcgatgtggatgaaaagattctggatgtcaggatcataaaatttgttttgcagcctctggtggagaatgcgatttatcatggattgaaatataaagaaacgaaagggaatctggatattcgggggtatagaagaggcagtcgtgtctgtctggtcgtggcagatgatggagccggaatggatgaagacgagttggagcatatttttgaaaaaaaagaaaaaaagaaaaagtccaatggtgtaggagtctataatgtgcaaaagagactgcagctctactatggaacagaatatggaatttcttatatcagcagaaagggagaggggacagttgcgacagtgacgatccctcttgacggaggaaaaagcaatgaagacacgggcaggtaaaagactgatcgcagcgatgacgaccgggtgtgtgcttttgattctcattttgatcaccattggggttcttcaggataactcggacaataaacgcacttacaagatcatcatggtgcccaaaacgatcgatgaatcgaatgatttctggactggtctgatcgaaggagccaaactggcggcaaaagagcttggttgtgaaatcgaggtagtaggaagtgattcggaagatgattatgaaggtcagaatcgtctgatcgaagagagcattaaaaagaatccagatgcttttttaatcgcaccatgcagctatacgcatacaacagaggctgttcagaaagcgatcaatgcagggattaaagtgattttggtggattctgtgatcgacaaacagattgcaaatggtgttgtcgccacggataattttaaggcaggaaaagaattgggagaatttgcaaagacgattttaaagccggattcaaaaatcggggtggtggctcacgtaaaaggaagttcgacggcaaccgagcgggcggacggtatccgggaaggactgggagaagatgcaggcaggattctggatattgtttattgcaattcttcatatgatctggcaagtgatctgacagaagaaatgctgcaggaatatccggagattgatgttctgatcggaacaaatgaatattcagcagtaggtgctgcgcgcggtgttaagaatctagggatggaaaacaaagtgaaggtcgtcgggtttgacaattcagtagaacagatccagcttctggaagcaggggtgtttcagggcattgtcattcagaaaccgtttaatataggatatctgggaattgagcaggcagtcaaggcgattgaaagatatccaatggaatacaatctggattccggatgtaaactgattacaaaagaaaatatgtatgaagaagaaaatcaaaggctcttatatctgttttccggtcaacagtaaggaaaaacggttaaaaagttacactacagtgtgaaatctcattctgtggtgtaattttttaaccttttttaggaaaattttcaatttcaatcagcaaaaagaaagactatactatatataaatcttagttctgaagtcgcgtgttcgagagtctgtttcgattcagagactacgaaaagtgtgaaatctggggttcatgttttcaaagtattgcagcgggcgcccaaagaagcgagtcagatacaaaaccgtgatacaggacagcaagatgggaaatgattccgcgttttaagagacggaataaaagaagtaggaggacgaaaagtggaaaagattaaacaaaatccttttgtaaaaaaggtagggtttaacagaatcgtgttatgctttgtattgcttctgatgtatgcgttcttctgtgcattgacacagggaaacttcttcggaattgaacgtattctgagtaccctcaattatgcatattttctggggttcttatcattgggagttacctttgtaatcgcaacaggaggaattgatttctccatcggaccggttatgttttgctgtgcattgatctccggttattgctttacatcacatggtattccgatgccggcagcattgcttctcagtattgtgatcggattggtgttcggaatcttcaatggatatcttgttgcatactggtcagtaccttcattcatcacttccatggcaagtatgaatatctcaaaaggtgttgcttctgtatttacaaagacacagtctgtcagctggccacaggagatgcaggacggcggatggtttagaaaaatcatcagcgttgatggaattccggtaggactgatcatcttccttgcagtagcagttatctgtgcgattctgttaaataaaacgaaacttggacgttacatcttatgtcttggaagtaataaagaagcagtaagactttccggtgttaatgtaaagaaatgggaaatgtctgcatatattatctgtggaatcctggttggtatttcagcaatcttctacacagcagcgtatacaactgttcagcctggatatggtgatcagtacaacaacgaagcaattgcaggttgtgtaatgggtggtacatccatggcaggtggacttgcttccatcagtggtacagtgatcggtgtatttatcatcgcattgcttcaggaaggtattcttgctcttggctttacaaaagattatcagcttatcatcacaggtcttatcgttatcgttgcagtattcagtgacgttgtcgcaagacgcagaaagaactaattgtgatacataataattgagagaagaagtgaaatagaaaggcaagggtaataaaatgggtgaagttatattaacgatgaaaggaatcgacaagtctttcccgggtgttcatgcattggatcatgtagatctggaagtcagaaaaggtgaagtccttgcgctgatgggagagaacggtgccggaaagtctaccttgatgaaggttttgacaggtatttataaaaaagattccggaactattacatatgaaggaaaagaagtagaatttgcaaatacaagagaggctcaggacaacggtattgttatcgtacaccaggagctgaatatgcttggtcacctgacagtagcacagaacatctttatcggaagagaattcaaaaaaggaattcgtatcgatgataagaagatgaatgaagaagcaaaaaaactgtttgacagaatgcatatcgacattgatccaagagagacaatgaatcatctgacagttggtaaacagcagatgtgtgagatcgcaaaagcaatttctcacgatgcaaaagtcatcatctttgatgagccttctgcagcactgacagagactgagatccaggaaatgttcaagatcatcaatgacttgaaggcaaaaggaatcggtattatttatatttcccaccgtatggatgagatcaaggtgatcacagaccgtgtaacagttatgcgtgatggtacttatgtaggaacattgatcacaaaagactgtacaaaagatgatatcatcaacatgatggttggacgtgttatttatgaagatccaaagacacagagtatggtgccaaaggatgctccggttgtattgaaagtcgatcatctgaacgctggaaagatggtaaaagatgtcagcttcgagctgcataaaggtgaaatcctcggattctcaggattgatgggtgcaggacgtacagagactgcccgcgcactgtttggagcagatccgatcgacagcggtgatatttatatcaatggtaaaaaagttgacattaagagtccggaagatgcagttaaaaacggtatcggatatctttcagaagacagaaagagatacggaatcgttgtacagaaatctgttgcggagaacacttctatggcaacgatggaagagtttatgaagggaatcttcattgacaagaagaaagaaagagaagtggctcagcagtatgtagattcactggctacaaaaacaccaagcgtagatcagctggttgtgaatctgtcaggtggtaatcagcagaaagtcgttattgcaaaatggctggcaagaaactgtgatatcctgattttcgatgagcctaccagaggtatcgacgttggagcgaaaaatgaaatttataaactgatgaatcagctggcagaacagggcaaagccattattatgatttcctctgaaatgactgagatcttacgtatgagtgatagaatcgtcgtaatgtgtgaaggaaagaaaactggtgagctggatatttccgaggctacacaggaaaatatcatgaacatggctacacgagagatagagtaggaggaagtaaaaatggcaaataagacaacaaagacggctggcacaaataagtcgttcattgacagaatgggaggacagaaattcattgttttcctgatcgtaatcgcaatgttcatcttcttttgtgcgatgagcccgggatttagaaagtatacaacgtttgtaagtattctggattattcttactatattgcgttgatggcaatcggagttgcattccctctgatgacaggtggtgtagatctttccattggtacaggtctgatctgttattcactggtaggcggatacctgatcgtacatcagggatggccgacagcagctggtatgctggtaagtattttaatgggtgttgcaattggagtgctcaacggagtgctggttgcgattatggatcttccggctttcctggcaacgttatgtacgtccatgatcgccagaggtattggtacaatcgtagtaggcggatttggtattccttggccggtagcaggaacaccggaaggatggtttagaaatatcttcaagatcaaaacggaaggaatgaatatcccgatcggatttttatggatcattttacttgtgatcatcatgacatttgtattgaatcatacaaagatcggacgttacacactggcaattggaagtaacaaagaagcaacaagactttctggtgttaacgtaaaattctaccacattatggcatatgtaatctgtggattctttgcaggactggcagcgatttcttattctgcaattttcgcaacagttcagccaggtagtggtgccggatttgagctggaggcaatcggtggagcaatcatcggtggtgtatccatgacaggtggtgtaggaagcatcacaggaacactggcaggtgtattcgtaatctgtctgttaaagacaggacttccatttatcggattgactgcaaactggcagcagatcatcacaggtttcgtattgattgcagctgtattgatcgatatctttaagagaaagaaagaagctgtttaattttaagaggatagatagcagaccggcgttgggaatcctgggaattcccccggctgttactatagaaaagaggaggctgcacctcggcttgcagtcagaaaacatatcttaggaggataagaattatgaaaaagaaagttttagcagtgttacttggcggatgtatggtagcaggattattagcaggatgcggcggcggagacagcaaagaagcatctgatgacggaagcaaagattccggaaagagcggcggatacaactttgaagttgttgtaaagagcttccagtctacatactggcaggcagcaaaacagggtattgatacagcatccaaagatcttggtgtaaaatgtaacacaacaggaccaaacgctgagtctgatatcgctgaccaggtaaacatgctgaataatgcaatcaacaaagctccagacggaatcgcactggcagcttgtgaccagaaatctgttctgaaatctcttcagacagcactggataagaaaatccctgtagtttgtttcgatactggtgtagcagatgctccagaaggatctgtatacgcaacagttgttactaacaacgaagaagctggtggaattgcagcagaaaaaatgtatgaagctctgaaagatcagcttgcaaatgcaaaagatacagtaagaattggtgaagtaaaccaggatgctacatctggaaacatcacaggacgtggtatgggattcatcaacaaattcaaagaacttgctgaagctgacggaaagaaagttgcagtagttggaaacgaatactatgtaaaccttgttgaaaacaatgcaaaagaagctgacgctgatatcatcatcgaagtagctgtacctgcacagacaacagtagaactgtctgctacagaagcttctaacatcatgaacaagaaagatacaatcgctatgttcggttctaaccaggtaacagcagaaggtcttctgacagctaaccagaacctggatgtacttggatcaggcgaaggaaagatccttggagtaggatttgacgctggttctacacagaaaggtgctgtaaaagacggcgtattacttggatcagtaacacaggctccagtagatcagggaagaatcgctatcgagactctgtatgacatctgtgaaggaaaagaagtaaaagacgtagagacagcttgctactggtacgatgcagaaacaatggaagatgcagaaatcgcaccaaacctttacgactaatcttttgctgatcaaacagtaaaaagtgatataaggagaaaccgggggttttcccggtttctttttatgaaagacaaacactcaggaggaacacacatatgctcaatggaatagaaactatttttgataacagagatcaaatgcttcgacatttaaagaaaaaatcatttgaaaaaaatacacagagttttattgactcttatggccactattttcgggaaatgacagaatatgttgacagtgtttctgataaagagcaggcagcagcagaaattgcaaatacactggtgaactgcgtcgaaaagaaatttgcttccagaaaaggaaaaattgattccagaacacaggttgatttgaatttcgttatgatttattatgtttttcctacaattttggggacagagcacgaatatgcaaagttgatcgctgacagcatttgcagtgcatggggaaaacagtttaaggaaagtcagatacagtatacggattatgatacattgtatggatcattcagagagaaaatctttggcattttttaaaaagggtttcgccaaaaagcaagatgaatttggagttattctgagggtttcagttaaggtatgaaaaaataagagtgttttcagacgattatggggattccccgcaggaaggtgagaaaaacttatcctgcggggattttttatggaatggataatgtgcatatttttatattttgagatattttttaggtgtggttcctttgtactttttaaaggttttgataaagtagctcagatcattgaaaccggaggcataggcaatctcagtaatagagagatttgtggtgatcaattgataacaggcacgttcaatgcggtagtaattcaaatagtcaatgggtgtgcggtgagtcatttcatgaaaaaatcggcagaaatatttgggggacatatcgacactggcagaaatttcttccagagtaagcggcatattataagaagactccataaattccagtgcctgttttaactgtacgattcttttatgactgcggtgctgttcatccggtgcgcttttgtagaattcctcgctgaataatgttccgaaaaactggtacattgccccaaaaacgacgagctcatagccttctttttttgaggctgctgcgtcgaaaagtgtccagaggatgtgtcggatagaatcacaggatttcacgtagtgggtatgtacagagatttcatgatcagtgatctggcggagaaaacgacagcaggaatcggtcttgttcataagcatattcatatcaaatacaagacattcatacacacaatcatgaggaatgccggcatggatcgagcctgcaggaataaagatgctgtcacctgcttcggcaagaaattcaatttcatcaattgtgacagtcagtgatccgcttaaaatgcggatcagttcgaattctacgtgccagtgaaatgacatgacatactgtggatgtgaagcggtaacgtggtaatattcgagaggaaagtctgcggttcctcttcttctgttttcccgatagttgatatattgcatagtatactcctaggtgaatattgttatattttttactattatagcacaagtaaaaagtggcagacaatgataaaatgaaatcagtaatggttaagaacctttgaaaggaggcatatcagtgagcgataagaaaaaacaagttctggcgtttgacttcggaggaggaagcggacgtgcgattctgggaacattagaagacggtaagatccatatggaagaagtacaccgtttttccaatgatccggtgatcgtgaacggaacgatgtactgggatacactgagacatttttttgagatcaaacagggcatcgtaaaggcaaaacaaaaaggtggctttgaaagtattggaattgacacttggggcgttgattttggattactggacgagcatggcgatttgcttgagagtgccgtacattatagagatgacaggacactgggaatgcaggaagaagtattcaaagtgattccgaaagaggaagtttacaatctgacaggaaatcagtttgaaaactttaatactattttccagttatactctctggttcagaagagaccatggattttggaaaaagcagatacactgcttttgactccggatttgtttaactactttttgaccggcgaaaagaaggccgagtatacaatggcaacaactacgcagttgatggatgcgaagaacaaagtctggtcagaccggattctggatgcacttcagattccaaagaagattcttccggagattgttccaagtggtactgtggtaggtacgctgcagccatcgatctgtgaggagctgggggtagaacctgcaaaagtgattgcaatcacaggacatgatacacagagcgcagttgtttctgttccaacgcaggaaaaagactttatttttatcagctgtggaacatggagtctgttcggcacagaactggacggaccgattatcggagaaaaatcactggagtgcaatgtcagcaacgaaggtggatatggaaatacgacaacattgctgaagaacattatcggactgtggcttgcacaagagagcagaagacagtggatccgtgaaggccaggagtattcctttggagaactggaacagatggcacagaaagcagagcctttccagagctttattgatccggatgcaccggagttcgttccggcaggaaatgttccggagcgtattcgtgagttctgccgcaaaaccggacagaaagtcccagagacaattggtgagattatgtgctgtatcaaccagagtctggctttgaaatacagatatgcactggagcagattgaaagctgcacaggcaaacagtactctgtgatcaatatgatcggaggaggaatccagagcaagctgctttgtcagatgacagccggagcaagtggacgcaaagtcatcgcaggaccggtagaggcaacagctcttggcaatattgctgtccagctgatgtcacttggagaaatcaaagatgtggcagaagcaagacagatcatcgcaaattcagaaactacatatgagtatctcccgcaggatgtggaaaaatgggatgctgcatatgagaaatttaaaacatttattcaataattttcaaggaggaatgtcatcatggcagaatcaagattaatcggaggatacccggtaattggtatcagaccaacaatcgacggaagaagaggagcattaaaagttcgtgaatctctggaagatcagacaatgggaatggcaaaagctgcaaaaaaattgtttgaagagaacttaagatattccaatggagaaccagtaaaagtagtgatcgctgatacaacaatcggacgtgttgcagagtcagcagcatgtgctgaaaaattcaaaaaagaaggcgttgatattactctgacagttacaccatgctggtgctacggatctgagacaatggatatggatccaatgacaatcaaaggtgtatggggactgaatgcaacagagagaccaggagctgtatatctggcatctgttcttgctacacatgcacagaaaggtcttcctgcatttggaatttacggacatgatgttgtagacgctgatgattcagaaatcggagatgacatcaaagaaaaactgttaagattcggacgtgcagcagttgcagcagcttctatgagaggaaaatcttacctgcagattggatctatctgtatgggaattggtggatctatcattgattctgatttcatcgagtcataccttggtatgagggttgagtctgtagatgaggtagagattatccgtcgtatgacagagggcatctacgatgaagcagaattccagaaagctcttgcatgggcaaaagaaaaatgtaccatcggattcgataagaaccctgacgaactgaagatgagcgaagagaagaaagcagaacagtttgagttcgttgtaaaaatggcagttatcatcaaagatctgatgaatggaaataaaaaccttccggaaggatgcgaagaagaagcagtcggacacaatgcaatcgcagcaggattccagggacagagacagtggacagacttctatccaaacggagactttgcagaagcaatcctgaacagttctttcgactggaacggagcaagagagccatacgttctggcaacagagaacgacgtattgaatggacttggaatgctgttcatgaagcttttgacaaacaaagctcagattttcgctgatgttcgtacatattggagcggagacgctgtgaagagagtgacaggatatgacatcgaaggaaaagcaaaagaagctgacggtttcattcacctgatcaactcaggagctgcatgtctggatgcaaatggagaatccaaagatgcagatggaaacaacgtaatgaaagcctggtatgatgtaacagaagaagatcaggatgcaatgctcaaagcaacaacatggaacgcagctgacaacggatatttccgtggaggcggattctcttctcgtttcctgacacaggctgagatgcctgcaacaatgatccgtctgaaccttgtaaaaggattgggaccggttcttcagatcgcagaaggatggacagtacatcttccagacgaagtttctgataaactctggaagagaacagattatacatggccatgtacatggttcgcaccaagatgtacaggagaaggcgcattcaagacagcttatgatgttatgaataactggggagcaaaccacggtgcaatctcttacggacacatcggtgctgacctgatcacaatggcatctatgctgagaattccggtttgcatgcacaatgtaccggaagaggatatcttcagaccagcagcttggaatgcatttggtatggacaaagaaggtgctgactacagagcttgtgcagcatacggcccattatacaaataagaaaataataaggagtaccttcgggtgctccttctataaaattgcagaatgtttgtggaggaaatcaagatgttaaaaggaattccaaaaattttatcaccagaattactgaaagtattatgtgaaatgggacacagcgatcgtcttgtgatcgcagatggaaactttccatccgaatctatggggaaagatgcgattgtaatccgctgtgacggacatggcgtaccggagattctggatgcgatccttcaggtattcccactggatacatatgtagaaaatcctgtgaatctgatgcagttgatgccagatgatgtaggaaaagtagaaactccgatttgggatacttataaagaaattgtagcgaaacatgatgatcgtggggaagctgcaatcggaaatattgaaagatttgcattctatgatgaagcaaaaacagcgtatgcaattattgctacaggagaatcagcaatttatgccaatgtcatgctgcagaagggtgttgtagtagagtagaaattgcagtaattggagcgataactgagggatgttctgcaaaagcaggaaccattcctcagtttttgtgtttatgcatgtcttttgaaaatttggcataaagtaaaaagagacttcctttacgatagtaggaagagtgggaaacacaggtgtatggagtgtgaaaggatatgaatctggaaggaatctgggactggctgaaaggaaaacaacattcgcttcttgcagaagtggcagcggcaatggttttaattgtcgcacttggtgcagcagggggtatggcaggcagtacggacgggaaaaattcttctgaaggaaaagctgtacaggtaaaaacagaagaagatgaaggaaagagtagaaaacaggaaacggaaaaacaaatacaggcggaagaagtgattgcagatggacagtacccgatcatgggacagagcagtgtgacgatcgaacagatggtttcgtattttcaatccagtgggaatgcatatcctgcggacagtctggcaaaaggaggtgcggacagtattgaatccttttgccagatttatatagaggaagcacaggcggaaggaataagaccagaagttccctttgtacaaaccatgaaagaaaccggttttcttcaatatggaggggatgcttcgatcgagcagttcaactttgccgggcttggcacaaccgggggcggtgtaccgggaaattcttatccggatgtacgaaccggtgtgagagcacagatccagcatttgaaagcttatgcaacagatgtgcctctttcacagcaatgtgtggatgatcgatatgaatatgttcagaagggatctgctccgtatgtacagtggctggggcaaaaagaaaatccaaagggagcaggatgggcaaccgcagaaaactacggatattcgatcgtagagatgatttcacagttgaaaaaagattcctgaaataaagggaaatatagaaaatgtgtaaattctatgaattatcttaagatttttgaaattccttgacaaatggaatgtcgaaagatatgattaactggtagttcatatacagttaacaattcgtgagaatataaaggttatgagggagaggagtacacaattactcttggcagagagagtcgtccgaggctgaaagacgatttcaagaaagggctgtggaaggtagcttctgaaccggatatttgaaaaagaagtagaatatcccggagttgttcacgttacaggacaaaaagaagagatatgcgtaagcatataatgaaggtggtaccgcggaacattcgccctttgcattttgatgtggagggtgtttttttgttattgagagaatggtgtgcgggaataacagggacattttgaggaggaaattatgagtaaagaactggcaaagacctatgatccaaaggcgatcgaggaaaaactgtatgaaagatggtgtgagaataaatattttcatgcagaggtggacagaagcagaaaaccgtttacaacggttatgccgccgccgaatattacaggaaagctgcacatgggacatgcactggataatacactgcaggatattctgatccgttataagagaatgcagggatataatgcactttggattccgggtacagaccatgcagcgatttctacagaagtaaaggtaacgaatcagctgaaagaagaaggaatcgacaagaaagaacttggaagagaaggatttctggaaagaacctggcagtggaaagaggaatatgcgggaaccatcgagaatcagttgaagaaactgggaatttcctgtgactgggacagagaacgtttcactatggatgagggatgttccaaggcagttgaagaagtattcatcaaattgtatgaaaaaggatatatttacaaaggctcccgaatcatcaactggtgtccgaaatgtaagacatctctgtctgatgctgaagtagagcatgaagaacaggcaggtaatttctggcacatcaaatatccgatcgtaggaaccgatcgtttcctggagattgccacaacacgtccggagacgatgttgggagatactgcgatcgctgtacatccggatgatgagagatacaaagatattgtaggaaagaaagtactgcttccactggtgaataaagagattccggttgtagcagattattatgtagacaaagaattcggaacgggcgctgtcaaaatcacaccggcacatgacccgaatgactttgaggttggaaaacggcataatctggaagaaatcaacatcatgaatgacgatgccaccatcaatgaaaaaggtggaaaatatgcaggaatggaacgctatgaagcgagaaaagccattgtggaagatttgagagaacagggatatttagttgaaatcgaacctcactctcataatgtaggaacacatgaccgttgtggtacaaccgtagaaccattgatcaaacagcagtggtttgtgaaaatggaagaactggcaaaaccggcaatcgaagcattgaagacgggtgaattgaagtttgtaccagagcgtttcaataagatttaccttcactggctggagaatatcaaagactggtgtatttccagacagatctggtggggacacagaattccggcatattattgcgatgaatgtggtgaattcgttgtggcaagagagatgccggaagtatgcccgcattgtggctgtacccattttacacaggatgaggatactctggatacctggttcagctctgcactgtggccgttctctacactgggatggccggacaaaacagaagatttggattatttctatccgacagatgttctggtaaccggatatgacatcattttcttctgggtgatccgtatggtattttccggttatgagcatacaggaaaatcaccattccataccgttttgatccatggattggtaagagactcccagggacgtaagatgagtaaatcacttggaaatggaatcgatccactggaaattatcgatcagtatggatgcgatgctctgagactgactcttgtaacgggaaatgcacctggaaatgatatgcgtttctataatgaaagagttgaggcaagccgtaactttgcaaataaggtatggaatgcatccagatttattatgatgaacatggaagagaatgtcatcgcaaaaccagatgcatctttgttcaatgaagctgataaatggattctttctaaagtcaacagactggcaaaagatgtgacagaaaacatggataaatttgaacttggaattgcagtacagaaagtctatgattttatttgggatgaattttgtgactggtatgtggaagctgcaaaatacagaatttatcacaaagaagaagataaagcatctgcagactgtgtgctttgggtattgaaaaccgtattgaaacaggcattgaaattactgcatccatttatgccgtttatcacggaagaaatctacagtgttttggtaccggaagaagaatctctgatgatgtctgagtggcctgaatttaagagcgagtgggatttcccggctgaagaaaatgtcatggaacacgtcaaagagattacccgtggtatccgaaatatgcgcgcggaaatgaatgttccaaacaatcgaaaaacaaaagtttatgtggtatgcgaggatacaggcatttgcgagggcatcaggaatctggagaattcgatgaaaccattgatgatggcatcagaaatcctggtacagcagacaaaagaaaatattgcggacaatgcggtctctattgtagtgccggatgcggttgtatatctgccgttggaagatctggtagattttgaacaggagatggaacgtctgcagaaagaagaggagaaactgaaaaaagaaatcaaacgtgcagaaggcatgctctccaatgagcgttttatcagcaaagcaccggaagcaaaagtacaggaagagcgtgaaaagcttgaaaaatatacacagatgcttcagcaggtacaggagagaatggccggactgaaaaaataagtgaggttatcgatgaaacagattcatatgaagaaacctgatataaaaggctttttccagaaaatacgaaatttaaagatgcaggatatcaaagagcatttcaaggaaagaaaagagcggcgcagccagattctggagaagcgccgcaatggaaaatttgcgaaaaagatgcagccggtctacaggatgatgaatcggttttccctgattcttcattacctgttggcatgtatcttgaactttatgatcgaaattgtttccagacattctctgtttgaagcgtgggattatctggcaggtacaccaaaggtgtttttcttcaatgcctttttgatctttgcgacattttccatcgtatatctggtcaggcgccgagtgtttgccagaatcctgctcagtgtattctggctggcgcttggagtgtgcaacgggtatatgctgatcaaacgtgtgacaccgtttaatgcacaggatttaaaagcatggtcagaaggtctggcagtgtcaaagaattatttttcggcaatggaatttgcacttctgggaattggaattgcagctgtgatcctgtgggtgatctctatgtggagaagaggcggtcagtttacagggaagatgcatcggatagcagcactttttggagtggtgatctcgattggagcatatattggactcacggacattgccattgacaaacgagtggtatccaattattttggaaatattgcatttgcctatgaagattatggatttccgtattgttttgcaacaagtttattcaatactggaatttcagaaccggcaggttacagtgaagagactatgagcgagatcacaaaagacggtgaacttgcaaaaagcagcacaggattgaaagaaggagagatgccgaacatcatgttcgtgcagctggagtcatattttgatccaacggaagtggagtggctgcagttttcggaagaccccattccaaatttaaggaaaatgtatgaagagttttccagtggttatttcaaagcgccttctgttggagccggtacagcaaatacagagtttgaagtactgacaggaatgagcatgcgtttctttggaccgggagaatatccatataagacatatgcaaaaaccaaatatgtagaaagtgccgcatctgcactgggggtgcttggatatggagcggaggcactgcataataatggaggaaacttctacagtcgtgcacaggtatttaatcatatgggatttgatcattataccagtaaggagtttatgaatattttgcagaatactccgaacggatgggcaacggatgatgtgcttttaaaatatattgatgagtccatgaatacaaccgaaggtcaggattttgtatttacagtgagtgtacagggacatggcgaatatccaacggaaaaattgatcgaaaatccgaaaatcgtagtgacgggtccggaggatgagagcaagaaaaatgcatgggaatattatgttaatatggttcatgagatggatgagtttgcaggcaatctggtacgacaggttgaggaaagaggagagccgacagtacttgtattttatggggatcatcttcctacgatgggtctggaagcaaaggatctcaagagcagatatctgtataatacgaattatgtcatctgggataacattggtttgaaacaggaagataagaatctggcagcatatcagatcatggcagaagtatttgatcgactggatattcatacaggaaccatattcaattatcatcagcagagacgacagacgaagaattatcaggcagatctggaactcttgcaatatgatctgctttacggaaagcagtatgcctatgaaaaaaatggttcgacaataaaagaagggcatatggcaatgggagtcagtgatgtgacattaaataacctgatcgagcagttggatggaagttacagtttgtatggagagaattttaccaaacagagcaaagtctatgtcaacggtgaaaagcagagcagcactttcctgaacaatacgcgtctggatttaaaggatgccgaattggaagacggagatgtgatccaggtaaatcaggttggttccagcgaaacgattttccgggaatccgcgcaatacgaatataaggatgggaaattaaccagacttgaggatgaggaagacaagatagagactggccgaaatgcgtttgttgatcaggataagaaggcagaaaaggaaagcagcaatgaataagatgacttatcaggaagcagaagcatatattttagaactgccaaaattcaccaaaaaaaatacgccggagcatacacgaaaatttctttcttttttaggaaatccacaggatgggaaaaaagtgttccatgtagcaggcacgaatggaaaaggttcggtctgtgtgtatctggatgcgatgctcagagcacagggaaagcgtacaggcctttttatttccccgcatttgatccgaatcaatgaacggattcggatagatgcagaaccggtcagtgacgagacatttacccgtttgtttttaaaaacaagagaaagcgtaaggaagatggaagcccttgggcttccgcatccaagcttttttgagtttttgtttggaatggcaatggcaggatttgcggaagcagatgcagaatatgtaatattggaaacaggactgggcggacggctggatgcgacaaattcgatcagcagtccgcttgcctgtattcttacgtcgattggattggatcatacagaaattttaggagatacacttgaaaagatcgcagcagaaaaagcgggtatcttaaagcagcatgtcccggtgatctatgcagatacgcagaaggaaagcagcagtgtgattgaaaagagggcgaaggaacttgactgtccttgtaaaaaaatagggaaaagtgcgtacgaaattcttaaaattcaagatgggactcttgcattttctccggcaaatgcgtattatggagatactacatggaaattgcagaacacagctgtttatcaggcggaaaatgccatgcttgcgatggaggcaatgcgtactgtttttaaagaacaagggaatgtttccggatggcgggaagcgctttttcaggtgaagtgggaaggcagaatggaagagattctgccggatttttatgtagatggtgctcataatgtgagtgcagtgaagatgtttgtgcagagtattcagaatgatccgagggaaaagattgtgttattttctgccgtcagagacaaaaattatgaagagatgatacagatcctctgtcagcagagacatatcagtgaatatgtcatcacgttgatccaggatgagagagcagcacaagcggaagaactaaagcagatatttcagaaatatacagagcagcctgttgtggtaaaagaggatttgcgccaggcactgacatacctgttttcccgaaaagcaggaaaggtggtatattgtcttgggtctctatatctgacagggatgataaaagcgatgacagaggaggcagggtgatgctggactatgaaaaagaactcaaaaatttcaaaccgagtctggaagtagaagagattgaagatgcggtttatcaggaagatttatcagatatgacagatcttctaaaacaggtcatggaccagaagacaaagtaaaggggtatggtgagatagatggactatacggaaaaaatcctgcaccagtcaaattactggtacaatgatgggctgaggaaagcgcagatcagggatatgtccggtgcggtcacctctcttcgaagaagtctgcagtacaacagggctaatattgatgccagaaatcttctgggacttgtgtattatggcaggggagaagttgcagaggggcttgtggagtggatcatcagtaaaaatttaaaaccacaggaaaacctggcggatcgttttattgatgaagtacagaaatctgcaaagaaactggagcagatcaatcaggcaatcaagaaatacaatcaatgtctgatctattgtgaacagcagggggaggacctggcgattatacaactgaaaaaagtaatcgctgcacacccgtcatttttaaaagcgtatcagcttcttgctcttttatatcttcatacagaacagtatgcaaaggcaaaacaaattttaaaaacagcgagaaaactggacacaaccaatgagattacattgcgttatatgtacgaactgtccttggttgcagggcagaaaacaaaacaaagatccagagaagaaagtgtagagtacaagctgggaaatgagacgatcattcagccggctcatggaaaacgggtaagacatatttcaggaaaagtaacagtgggcaacatttttgccggtgtgttgatcggagcagcaattgtatggtttctcattgtgccgtctgtggatgaagcaaaagttgcaaagcagaatcagcaggtgatagaatacagcaaccggatcaatgcattggaagcacaggtcagtgcgcagacaaagacactggatgaataccgggcgcaggattcggataaggaagcacaggcaaagagtgcagccagtacttcagagagctacgagaacctgatgacagtttcaggccagtatgaaagtggtgagtattcagacgcaacgctggcagacactctgctgagtgtgaaccgggacgtacttggacagggaggacaggctctctacgatgaaatttccacagaagtttttcccggagcttgtgaaacaaaatatcagaatggactggcagcattgaacgttgccaattatgagactgcacttgatgcgcttggtaaagtcgtgcgtatggatgagcagtatgatgatggagctgctttgttaaatcttgggattgcctacatgagaagtggggatcatgagaacgcgaaaacatattttaatcgtgtggcagaattgtttccaggaacagaaaatgctgcagcagctcagaataatctgagttcgatgaatgacagtggaacagaaaacacaaagcaggcagaggatgcgcaggaataaggatgttgaaaaactacgaaagagaaggatatgcaaaggtgcatatccttttttgcgtttgcgtaccttgggtgcgcactaacaggtgaaaggagactggaaacgatgagtatggaatatcaggtacaggaaaattgcctgacaatttttctcccgagagaagtggatcatcacaatgcagaggaagtaaaaaagagtgcagatgcaatcatagaaaaagaacatatcaaatatgtaatttttgattttgagcagacagattttatggacagttcggggattggagtgatcatgggacggtatcgcacgatttgtctgattggaggagaggtgtgggcagtacatgccaatgccagaatccgaaagatcctgacaatgtccggagtgacaaaaatcatgcagatatatgaggaggagcaggtatgaaagacaccaatgaaatggaaattttgtttgacagccgttcagaaaatgaaggatttgcaagagtagcagttgcagcatttatgacacagttaaatcccacggtggaagaagtatctgatgttaggaccgcagtgtctgaagcagttaccaatgcaatcatccacggatatgaaaaccaggtacataaaatttcgatccggtgcactgtcagggaaagagagctgacggtagaggtaaaggacatgggaaaaggaattgaaaatattcaacaggcaatgacaccgatgtatacaagtaaaccagaactggaacgctcagggatgggattttcttttatggaagcctttatggacagtgtaaatgttgtatcaaaacccaacgagggaaccagagtcatcatgaaaaaaagtattggaaaagaaagggagacatggatcacacaatcgctttgatcgaaaaatcacacaatggagataaagaagcgagagaacaattggtagaagagaatatcggactgatctggtgtgttgtaaagcgattttacgggcgcggaacggatgcggaagatctttttcagatcgggtgtatcggtctgatcaaggcaattgacaaatttgatctgtcctatgatgtaaaattttcaacctatgcagtgccaatgatatccggagaaatcaaacgttttttgcgagatgacggaatgatcaaagtcagtcgttcgttgaaagaactttcttatcggacttttcagacgagagaacagatgacagatcggcttggaagagagccgacgctggaagagttatcgcaggaaatgggcgttgaaaaagaagaactggtacaggcaatggaagcatccggagaagtggagtctttgtatcgtccgatccatcagaaagaaggcagtgagatttctctgttggacaagctggaggaaaaggaacacagagaagaaaaaattctggatcgtatgctgcttggtcaattgctggaaaaactggacggacaggaaagaaggttgatctatctgcggtattttgcggaaaaaacacaatcagcagtgggaaaagagatgggaatctctcaggttcaggtatccagaatggaaaaaaagatcattcagaatttaagagatatgactcattgagaaaaacagaggagagattgtatatttttgtctggatatcagatactaaggaagaagaaaatcagggaggaatatgcagtggaaaacggaaagaaaaaagtaatgtggtgtctgacaattcttgtactgacagcagtggcgatcggagcagcctattatgtgatgacaaatctgccgcccgcacagcagaataaaggatatttgatccggaaagcggaggatatgttttatggctgttaatcaggacatactttatatgaaaggggacaggaatgtggagatcacaaagcgggaagtgacacttggtgatctgttggaaatggagtgcagcaatcatgcacttttgccccatttgaagacaatgaagattctgaagattccagaacatggagaaaaaagatatgtgatctcagttttgaagatcattgcatgtattcatcagaaatatccaggactggaaattcagaatttaggtgaaaaagatctgatcgttacgtatgagatgcaaaagacaccgtccaaatggctccatgtgatcaaaaccattttggttgtgatgatcacttttttcggggcggcattttccatgatggcgtttaataatgatgtggatgtggatcggctgttcgggtcgatctattattgggtgacaggagaacaaagcagtggttttacgatattggaaatttcttactccatagggattacaatcgggatcctggtctttttcaatcattttggaaagcgacgtttttcagtagatccaacaccgatggaagtgcagatgagactgtatgaaaatgatattcagacgacattgattgaagatgcagcacgaaaggaggaagaactggatgtgggcagagcagatcatcatgggggttataggacttagctccggggttgcagtagccggcggattattttcatttattgtggagcttggtgttgtggcggatctggcagaccggacacacacagcggaacatctgcttttgtacgaagattcggtcgcacttggcgggattttaggaaatatactgttttgttttccgttgttcctgcactgtccggctgcggtgcttctgattccgggattgatgtttggaatctttgtgggatgctgggcgatggcgttggcggaaattttaaatgtgttcccgatttttatcagacgagtgaaactggtacggtatatcaagtggtttattataggaattgcctttggaaaaggtgttggtgcatggattgcattctttcaataaaagttcacaaaattcatggaaaattaacaaaaaattagttgaaaacaaacaaagcatatagtaatatagagaaaaatatggctttgaaaggagtttactgatttatgaaaggttatgcaatgctgaaaataggggaatccggatggatcgaaaaagaaagaccggtatgtggtccactggatgcaatctgccgtccgcttgcggtggcaatctgtacttcggatgtacacacgctttgggagggcgcaattggagagcgtcacaatatgattcttggacatgagtgctgtgcagaggttgtagaagtcggagaattggtcaaagacttcaagccgggagaccgtgtacttgttccggctattacaccggattggaattctttggaggcacaggcaggatattcgatgcattctggcggaatgctggcaggctggaagttctccaactttaaggatggcgtattttcagaattcttccatgtcaatgatgcggatggaaacctggcgctgcttcctccgaatatttctactgtggatgcatgtatgctttcagatatggttccgacaggattccatggggtagaactggcagatgtacaatttggagatactgttctcgttatcggaatcggaccggtagggctgatgtctgtagcaggaactgcacttcgcggagcttcccggatcattgcagtcggaacacgtaaaaactgcgtagaggcggcaaaagcatatggagcaacggattttgtaagctataaaaacggtacgatcgaagatcaggtgcttgcaatgacagatggaaaaggagtcgataaagttgtgatcgcaggcggtggctgcgagacttttgaatctgcagtaaaatgtctgaaaccaggtggaaagattggaaatgtcaactatcttggcagcggtacttacgttacagttccacgtgtggaatggggcgttggaatgggacacaagcagatcaatggaggtttgatgccaggcggacgtctgcgcatggaaaaactgggcgcgctggtagcagctggaaaactggatgtacatcctttggcttctcatgtatttgaaggatgggatcatctggaagaggcactctttatgatgcgcgataaaccggcagacttgatcaaaccggttgtaaaaatttcagactgataaggatggcatgagagatgaagattttagttgtatccggatttttaggagcaggaaagacaacatttatccggacattggcagaacgtaccggcaaagattttgctgtgatggaaaatgaatacggagcagtcaatgtggacggagatcttctggggcagaccggatcattgaatatctgggagctgacagaaggctgcatctgttgttccatgcagacggacttcgcgacatctattctgaccatcgcgaatacagtagatccggaatatctgatcgtagagccaaccggtgtggggatgctcagcaagatcattgagaatattcaaaagatcgaatatgagagaatcacattgcttgagccgatcacgattttggatggtacgatgtatgaacggtgtatggaggaattttcagagatctgcaaagatcagatacaggcggcaggcaggattttgatttccaaaatggagcatgccggagaggatgaacggagcagtctgaaacaaaagcttgaagtgctcaatccggaagccaggatctgtgtttctcattatacagaaaaggaagatgagtggtgggattctctgcttacatcattccttgataaagaacttccgataaaagaagaacaagtattagatctggaaaatatcggactgacagaagtcagtctgcagtcagagcaggagctgatcctgtttttacagggagttgtttccggtgtattcggagatatctgccgggcaaaaggatacctgccggcaggaagcagctggcttcgttttgatgtgacagaccgtacatacagcattaccggagtggatgccatgccggaggcaaaatccatttttatcggaagacaattaaaaagaaactggctgcgtgaagtgctgcaaaaagaattgtatgcagaaccggcaaaacgggcagtgcgtccgatgcgaaagcgaagcgcagtataaaaagaagaggtgagatttctaaaacaggaatctcacctcttttttaaaactgcatccaaacccagtataagaatcccagaagagagctggtgcagattccatagagaatgacaggtccggatatcgtaaagattttacagccaatcccgaatacctgtccttcttttttatactcaattgccggagcggccacggagttggcaaaaccagtgatgggaaccagagcaccggcccctccccattttgcaattttgggatagagcccgactccggtaagaatgatgctgagtaagatcaacacaagggaagtccagctgctgcagtgattcttgctaagtccgatcatgtcgcaataattataaatcccctgtccgatcacacagatgattcctccggtgacaaaggcttttgccatattcagataaacattgtgtaccggcgttttctttttgacgtagtcttcatattgctgctgacgcttttctttttctgtctgtttcaaaatcatcgcctcctttttggatagtatccgaaaaaaacggaaaaatattctgttatcggaaaaattttcaaacagatgtatatttcattttatgggacgcatactaaaagcagaagaaatgttgaaaaatcaggaagaaaagaggagagaagatgaatcagatcaagggcagtcagagtatcagtttcggggaatccccgtatttgatcagcagtgcttctgtagcaggcagcaaggaggcggaaggacctcttggaaagctgtttgatatggtaaaccaggatgacctttttggagcaaaaacgtgggaggaagcggaaagtaccatgcagaaagaagcgtgtgttttggcacttggaaaagcacatgtggatgcaaagtgtgtgcggtatttgtatggtggagatctgctgcgccagggaattgccacgtccatgggcgtggaagaactgcagattccgatgtttggtctgtatggtgcatgctccacttcaggagaagccctggcgttgtcggctatgagtgtggcagccggatatggggaatacatgctggcggtgacatccagtcattttggaagtgcagagaaagaatttcgttttccgctgggatatgcttctcagcgtccgttgtctgcaagctggacagtgacaggaagcggagcatttctggtaggcagacagaaaagccatgtcaggatcacgggggtgacagtcggtaaaattgtagactatggtttgaaagactctcagaatatgggggcatgtatggcaccggcagctgcggatacgattttgacaaatttgaaggattttggaagaagtcctaccagttatgaccgtatcattacaggagatctggggtatatcggacagagcatcctgctcgatttcatgagtaaaaatggacaccagttaagagacagacatctggactgcggaatgaagatttttgatcaggacaaacaagatacccatgcaggcggaagcggatgcggctgtgcagcagtgacactttctgcctacattcttccgaagattcagaaaggggagtggaaacgggtgctgtttgtgccgaccggcgctttgatgtctactgtcagttataacgaaggggccagcgtgcccggaattgcacatggaatcgtgctggagcattgttgaaaaagaaatggaggaaagaaaaatggaatatgtacatgcattctgggtagggggactgatctgtgcattggtacagattttaatggatcgtacaaagatgatgccgggaaggattatggttcttctcgtatgtagtggagcagtgttgggctttttgaatatttacgagccctttcagaaatttgcgggagcaggagcaagtgttccgcttttgggatttggaaatgtattatggaacggtgtgaaagaggcagtggaaaaaaatggctttttaggtatttttatgggtgggttcaaagccagtgctgtggggatttccgcggcgttgatttttggatatctggcatcccacatttttgaaccaaaaatgaaaaaatagacatcgtgtattgcgtgttaagaaaacgtaaagattttgtgaaaattttgttgtcttttgtcgagtatgatggtatcgtaatagtgcggaaaattttataaacggtttattataggaggaaacgtatgaattacgtgagcattattctcccgtttgtcgggggactgggtatgtttatctatggtatgcagatcatggcccagggattggagaatgcagctggcagtaagatgaagagtctgctggaagtactgacaaagaataagttttttggggtgctgctcggtgcttttattaccgctgtcattcagagttcatccgccacgactgttatggtcgtcggatttgtaaatgcaggtatcatgaatctgacccaggcaatgggagtgatcatgggagcaaacatcggtacaaccgtgaccggatggctggtatccagtgttgagtgggcaaaagcgctcagtccggcgaacatcgcaccagtggcggtgatgatcggtgtgatcgtgatgctgacaggaaaaagacggtcgacaaaggacatttccagtatcatcgtgggattcggtattttgtttatcggtattacgacaatgtcagatgcggtagagccattgcagcagtcagaagcattctgcaatctgttcgtcacactgggacatagcccgttccttggaattatagcaggagcgttggtgacggcggtgatccagagttcttctgcatcggttggaattttgcagagtcttgcagcagcggggttggttccgtttaacgcggcagtctatattatcatgggacagaatatcggtacttgtgtgactgcgatcatgtccagtatcggagcaaagaagacagcgaagacagcagcggttatgcatttattgttcaacatcattggtacgattattttcagtgtggttgcgatcgtattctttaaagttgtaaatccaggatttggagcaggaatgatcacgcagactgagatcagtacggttcatacgatttttaatatcggaacgacagttcttctctttccggtatctgactggatcatcaaactggcgaagaagcttgaaagagaagattccaaagatgtggatgaagcacaggtacttctggatgacagaatgcttgaaacaccaagtattgcactgcagtctacagtcagtgagatggtgagaatgggttatattgtacgtggcacaatggaacgtacaagagatgttctgatcacaaagaagcgtgaggagattgagcagatccgggaggaagagtctattgcagacggtctttgcaagggaatcacagagtatgcgatcaagttgaatacactttctatcaacgagaaagaacatcagaaagtggcaagtatcctgcagatcgtatcggatatagagcgtgtcagcgattattgtgagaatatttctgaatttgcggagaatttgaaggaacagaaagcttctttttctgagattgcaaaggaagagatccagcagatggaagatgtctgtattgattgtttccggtatgcggtggaagcactggaagagcacagcaaagaaaaagcaatgaaagttattgaaaaagagagtcaggcagatgagttggagattgcactccgtacggctcacatgaagcgtctggcaagaaatgaatgcagcacggaatccggaatcgtattcctggatgcattggtatgtcttgagagaatctcggatcatgcgcgaaatattgcagaagagattttgacaggggaatagaaaattttacaaagcaaacagaacggggcatttgcaagagagggcaaatgtcccgctttttcgtgcttttttgaaggctttacaagaatttaacaaagaaggaaatgacggttttacatagatttaacattctgatgatgatatattttacatttcctctgtatgattgctaactgtggagaaaagaaaaatacttttgaaaaaaaggagattgtgtaaaatgaaaatgaaaaagtttatcgcagttttagcaaccgttggtatggtagcagcaatggcggcaggatgtggttctggagaagatacaaaagaatctgcttctaataacgaaacaagtaaaacagaaagtacatctggagactgggattccgcaaatgatattacaatcgtgtccagggaagatggatccggaacaaggggagcgttcgtggaactgtttggtattcaggaagaagtggatggagaaaaagtggatatgactacggttgatgcacaggttacgaataacacgtctgttatgcttacaacagtagcaggggatgagtatgcaatcggctatgtatcattgggatctttggatgagagtgtaaaagcactcaaaatcgatggagcagaagcaacggaagaaaacattgaaaatggttcttacaaagtatcccgtccatttaacattgcggtaaaagaggggaacgacaatgaagttgcaaaggactttattacatttattatgagtacagaaggacaggaaattgtggcagataacggatatattcctgttgcggatacaaaagcatatgaaggaaaaaaaccatccggaaatgcagttgttggaggatcttcttctgtatcgccagtgatggaaaaactgattgaagcatataaaggcgtgaatccaaatgcaaaaattgaattacagacatccgattctacaacgggtatgacatctgctctggaaggaagttatgatatcggtatggcatctcgtgaactgaaagaggaagaagtgggccagggattacaggcaaccgtgatcgcgacagacggaattgcagttatcgtaaataatgccaatccgacagaagagctgagttcagatcaggtaaaatccatctacacaggtgaagtttacacatgggatgaagtagcagaataatcggataagaggaaaaaagaatgaaatcaaaagcatggactgaaaaattcatgcagggagtgttcttcattgccgcctgtgcttcggtactggcggtagctctcatttgtgtctttctatttgcaaatggagtccctgcaatcagagaaatcggttttgtaaaatttatcaccggagaactctggagaccgaacaataaattgtttggaatttttccgatgatcattggaagtttatatgtcacggcaggtgcgattgtattcggagtaccgattggaatcctgacttctgtgttcatggcaatgtattgtcccaaaaagatatacagacctttgaaagctgcaacagagcttctggcaggtattccgtcagttgtatacggattttttggcttggtcgtactggtgccgatgattcgggaatttggaagaactttaaggcagatgggcatcgtggaaaaagcaggagatggaaagggactactgacgacatccatcattcttggcatgatgatattgccaacaattataggaacaacagaaagtgcgatcagagctgtaccgacacattattatgaaggggcgctggcacttggagcaacacatgaaagaagtatctttaccgtagtaataccggcggcgaaatccggagtgctggcaggaattgttctgggaattggacgtgcaatcggagagactatggcggtaattatgatcgtgggaaatcagccgagaattgcacagaatattttacaggggatgcgaactttgacaggaaatatcgtgctggaaatgggatatgcgacaggcttacatagagaggcactgattgcaacaggggttgtcctgtttgtgtttattttgattatcaactttagtgttgcaatgctcaaaaggaggacagaacatgagtaatcagacaagaagtggagaaaaatggaaaagttatttgaaacatccgggatcgctgattgtcatgcttctcgtcatgttgagtgcaattgctacatttgcagtgctgctgtttttgattgcatatatcttgatcaatggagttccgcatattaaaccatctttgtttgcgttgaagtatacatcagaaaatgcttctctgatgccggcattgatcaatactgtgatcatgacattattttctttgttaatcgcagttccatttggaattttttcggctatttttcttgtggagtatgcaggaaaaggaaacaaatttgtaggtgtgattcgtctgacagcagagacactttctggaattccgtctattgtatatggactgtttggaatgctgttttttgtcaatacactgggatggggattttcactgttggcaggtgcgtttacactggcgatcatgatccttccattgatcatgagaacaacagaagaagcattaaaagctgttccggattcttttcgggaaggaagttttgggcttggtgcaggaaaattgcgtactgtttttaaaattgtactcccatctgcgattccgggaattctggcaggtatcatcctggcagtgggaagaatcgtgggagagacagcggcgctgatttatacagcaggtacggttgcgcaggtgccatccagcgtgcttggatcaggaagaactctggcagtgcacatgtataatctgtccagtgaaggactgtatatggatcaggcatatgcaaccgcagtgattctgctgatccttgtagtcggaatcaacacattatccagtgtgattgcaagaaaattgacaaaagcgtaaatagaaaggaatgtaaaatggggaaaatcagtattaaaaatctggatctgcattatggcgattttaaagccctgaaaaatatcaatctggaaattgaagcaaataaaattacagcatttatcggaccaagtggatgtggaaaatcaacgctgttaaaatccatcaaccgcatgaatgatttggtagaagggtgccgtattgatggggacatccttttggatggaaaaaatatttttaaaggaatggatgtaaatctgcttcgaaaacgcgtaggaatggtatttcagaaaccaaatccgtttccgatgagcatttatgataatatcgcatacggtccgagaactcatggaatccgttccaaagcaaagttagacgatattgttgaaaaatctttgagaaatgcagcaatctgggaggagtgcaaggatcgtctgaaaaaaagtgctctggggatgtccggtgggcaacaacagagactttgcattgccagagcattggcggtggagccggaagtcctgctgatggatgaaccgacatctgcgctggatccaatctctacctcaaaaattgaagaccttgcgatggaattgaaaaaagattatactattgttatggtaacccataatatgcagcaggcagtgcgtgtgtcagacaatacggcgtttttccttctgggggaagtcattgaatataataatacagaaacattgttttctattccgtctgacaagagaacagaagactatattacagggaggtttggttgatttatgcgaaacagatttgacagacagttacagttgctggaagagcagttgattcatatgggtgagctgtgtgaatgtgcgatagcaaatgcaacgaaggcattgagtgacggcagtatcgagcaggcaaaggctgtgatcagcgcagacacagaaattgatgagatggagaaagatattgaaaaactctgtttaaagcttcttttacaacagcagccagtagcaaaagatcttcgaagaatttcagcagcattgaagatgattacagatatggaacgaatcggagatcagacagcagacatcgcagaaattgtaatttccgcacagacagcggaaagtgtggatatcaaagagatcggaacaatggcatcagcagttagcaagatggtacgcgacagtgtgacatcatacgtgcaaaaagatctggagcttgcaagacaggtgatgctggaagatgataaggtagatcagctgtttgacaatattagagaagagctggtcaattacattgcggtcaacaagggcagccgaggcagtcggatcgtagatttgatcatggttacaaaatatttggagcgtattggtgatcatgcaacgaatattgcagagtgggtagaattttctatcacaggagtacataaaaacggagtcaatgtataaggagaaacgatatgatttattgcgtggaagatgatgataatatccgcgaactggtcatttatactctggagacaaccggactcaaagcaaagggcttcgcagaaggaacggcatttatggaagctttggcgtttgatacgccagagcttattttgcttgatattatgcttccgggagaggatgggctggaacttttacgaaaactgaagggttctgccaagacaaaggagattccggtgatcatggtaactgcaaaaggtgcagagtatgacaaagtggttggtctggattccggagcggatgattatgtaacaaagccttttggaatgatggagctggtgtccaggatcaaagcagttctgcgcagatccggaagggtacaggaacaggatgtcctttcggtcaacggagtctgtgtagatgtcaaaaagcatgaggtgaaagtagaaggcgatattgtcacactgacactcaaagaatttgaacttttggagcgattgatgcgaaatcagaacatcgtgttgacaagagatcagcttttggaggacatctggggatatgattttgatggagaaacgagaacggtagatgtgcatgtgcggactctcagacaaaaactgggagaaaaaggggatatcattaagacagtaagaggtgttggatatcggataggaggcggcaatgaaggttaagatccagagaagtatgctgcttgttctgttcgctacgctgctgatcttttatgcacttttggtattggttatgtatcagaaaaatcttacgctgttaaagcaagaggtgaatcaggaggcacgctatatccgtactgcgattgatatttcaggatcagaatatctcaaagaaatggatgcggtggatcgaagaacccgtgtgacaaggattgacgcagagggaaaagtgctttatgattccggaaatgatgcagaaactctggaagatcacagtaaacgtccggaaataaaagaagcacttgcagaaggaacaggtgaagatgtccggatgtccggaacggtgggaaaagagatgtattattatgcaattctgctcgaggatggatcggttcttcgcgtggcaaaaacaatggataatctgggggcaatggcaaggagtactctgccggttatcagcattttggccgttgttatgatggtatttgcaggaattctcgggcgttggcagacagaaagactgattcgcccaatcaacgaactggatatcgaacatccgctggagcatgttgtatatgaggaactcaggccgcttttgacagcgatggataaacgaaacaaagaaaaggcagcagtagaggatatgagaaaagaattttctgccaatgtttcccatgaactaaagactccgctgacttccatttccggttatgctgaaattatgaaaagcgggctggtgcgggcagaagacattcccaatttttcagaacggatttataaagaagctaaacgtttgatcactctgatcgaagatatcatcaaattatccaaactggacgaaggctcggtagaaattgaaaaagaagaagtggatctttacgaattgagcagagagatcatcagcagactgtccatgcaggcaagcatgaagcacgttcacattacacttgcaggtgaaccggtagcgtatgtgggaattcgacagattttggatgagatgatctacaatgtctgtgagaatgcgatcaagtataatgtagaaggcggtagcgtttctgtctgggtagggagcacattgagcggtcctaaaatccaggttacggatacgggaatcggcatcccggaagaacatcaggaacggatttttgagaggttctatcgagtggataaaagtcattccaaagaaagaggcggaaccggtctgggtctttcgattgttaaacacggggctttgctgcacaatgccaaagtaacggtagaaagtgatacaggaagaggaacccggatggagatcctctttgagacctctcaatcagagtgaagcagaagtgtcctcggaggttcgtgaaattcggatttgtatgcgcgggagaatgtggagtaatcctgaaaaccgctggaaagacatgcctgtgtgatcggcattccgtcgagaatcagagcacgggcagataaaagcctgcggtaggtaatataatttccaatggtatatccggtttctgttttgaaaagacgcatcatatagtatttgcttaaataaacacgggaagcaaggaaatcgatatccaaaggttccgtcagatgttggttgatatactggatcaggtctaccacttttgggttgtacagactggtatccagaaattctacccggtttttcagggcagctctgttgagatggatcataaattctaaaaatagaatctgtctgtacaggctgccggcatattcggtatcggagaaagaacgttccagtcgattcgtgatcttgaacagagaactcttttcaagagaatggatgcgaagtacattggaatgttctttttttgctttttcaaaacaataagacagatcatactcttctgtgcgataagcctccataaaaccaggagaaatatagacaataattcgctcatatggtgcggacggatctacctggattcggtggatatcatttcgattgaccagcacaatgtcataaggctccagagaataggtctttccttctacaaagtattgaacattaccggaaataaaaatggtgatcttgtggaattcgtggtaatgaaattcgatttctgtggaaagctgatctgtcagatgaaaaattttaaagtcactatttaaatatcctcgtttattgtatccgttcatagcatcctccctgtcatttgaataatgagatacatttagtatagagcattatctgcaatatagaaagcatttttctcattctatttgaagaaaatgccggatataataaaaacagatgaaatgaagaaacaatgtcgaggaggctgtacgatggatatgatattagagcggtatcatggattggggaatgattaccttgtctacgatccgaataaaaatgaattggaattgaacgaagaaaatgtaaaaatactctgcaatcggaatatggggcttggagcagatggaatcctggaaggtcctctgatggagaaaaaacagatggcagtaagaatctggaaccccaatggaagtattgcagaaaaaagcggaaacggagtccgcatttttgcaaaatatctcaaagatgcaggatatgtgcagaagaagcattacaccatgctgacagacggtggtgaggtggcaatcacgtacttgaatgaagagggaagcagactgaaagtttcgatgggaaaattgtctttctggagcgatgaaattccggtgattggtgagcgcagacaagtgatcaatgaagacatggtttttggacgtacattatatccggcaacctgtgtctcaattggtaatccacattgtgtgattcctatgcaggagatatcggaacccctggtgtgcaaaatcggcagggaatcagagcgcgcaagatattttccaaatcatatcaatacagagatcatgaatgtgatcgatatgaatcatattgcaattgaaacatatgaaagaggggcgggctataccatggcgaacggtaccggagcatgtgctgctgcgggggttgcatacaaactgggactgacatccaatcaggtgatcgttcatatgccgggcggtgaactgcaggttgaaataggagaagactgggaagcttatatgacaggggatgtgttttatgtggctgaagtcagattgagcaatgaatttgcagaaatgctgcgggcagtataaaggagagaggcagagagcgagagttctctgcttttctatgtaaagaaattctcttgcggcggagggacagatgtgctacgatatctataacaaaagaagaaaaaggtgatagtatgctgataacagtcgattttaacagtgaagaggcgatttatatgcagcttcgcaatcagattattatgggaattgccacgtcagtcatccgggaaggagattcgctgccttccgtgcgccagctggcagatacagttggagtgaatatgcacactgtcaataaagcatatactgttttgaaacaggaaggatttattcagcttgacagaagacatggagcagtgatcgcgttagatgcggataagatgcatgcgctggaagaaatgcgcagacagcttcggatcgtgctggcaaaagctcattgcaaagcaatcaccagggaagaagtgcatgaactggtggatgaaatatttgacaactatgaatagcaggaggggtatatgcagaatcaatatacaagacaggcagagcgtgcgataaaatacgcagctaaaatggcaagaaaattaaagcatccgtatatcggaaccgagcatctccttttaggactgcgcagtgagatcacaggagttgcagggcaggtgcttgcgtcacatggagtggaagaagaaaaacttctgcgcctgatggatgaactgatcgttccgggagaagacattttgcagcaggacgacccaaaggaaagcccgaggctggagtatattctggaaaacgcaaagaaagaagcattgcatcttcgtaccggagatgtggggaccgagcatttgcttctggcaatcatgcatgatgctgactgtgtggctgccagaatgctgatcacactgaatatcaatctgcagaagatcctgcaggacgtattaaatgcggcaggtgtagatataaaagaatatcaggaagagatacaggaagatggtcgcacaagaagaggagcgatcgagcagtattgcacagatctgacagcggaagcggcagaaggcaaactggatccggtgatcggcagagaggatgaaatctatcgtctgatgcagattttaagtcggcgaaccaaaaataatccgtgtctgatcggagaaccgggtgttggaaagactgccgtaatagagggactggcagaacggatcgcagcagaagtcattccggaagggatgaaagggaaacgagtcctgactctggatcttccggctctgatcgcaggatcaaaataccgtggagaatttgaagaacgcatgaaagggctcatttctgaagtaaaagcagacgggaatagtattttatttttggatgagatccatacgatgatcggtgcaggtggtgcggaaggcgcaattgatgcctcaagtattttaaaaccatcgctggcgagaggggagattcagctgatcggagctacaaccattgcagaatatcgcaaatatattgaaaaagatgctgcactggagcgcagatttcagccaattacggtcgaagaaccaacggaggaacagtgcctggaaattttacagggattgaaaagccgctatgaggcacatcacagggtggagatttcaaaagaggcgctgggagcggcagtggagctttcaaagcaatatattacagacagaaatcttccggataaggcaattgacgtgctggatgaagcgtgctccaaggtgagtttaaaaggatataaagttcctgacaatcttcagatgctggaagaggaattcaaagagctagcaaagaagaaagaagagagtatccgcaaaggagatatgcaggcagctgcagattttcatgcaagggagaaggaagcagaggaaaagatagaggcgcttcgaagtcgtttccggaaaaagcaggcatctgtacatccacgggtaagtcaggatgatattgcagatgttgtgtcgttatggaccaaaattccagtacagaaattaaaagagacagatgcacacaggctgcagaagttagaggctacactgcataaacgggtgatcggtcaggaagaagcggtcagcgcagttgccagggctgtaaagagagggcgtgtaggtttaaaaagtcctaatcgccccattggatcctttttattccttggccccactggtgtcggcaagacagaactttccaaagcgctggcagaagcgttgtttggccgggaggatgcgatgatccgtgttgatatgtctgagtatatggaaaagcattcggtggccaaaatgatcggttcccctccgggatatgtgggacatgaagaggggggacagctcagcgataaagtacggacacatccatattcagtagttctgtttgatgagattgaaaaagcacatccggatgtatttaacattttacttcaggtgttggatgacgggcgcatcacagattcccagggcagggtaattgatttcagcaatacggtgatcatcatgacatccaatgcaggggcaaaggcaatcgtagatccgaagaaacttggatttgcagtaaaagaagacaaagcagatgattataagcggatgaaacaaaatgtaatggatgaagtgaagatgatcttccgtccggaatttttaaacagaattgatgagatcattgtattccatgcattgggtgaagagcagctgaaaaagattgttggtttgatgtgccgtgaatttacaaaacgtgtaaaagctcagttaaatattagtctgaccctgagagattctgccagaaaacgaattgcagaaaaaggaaaagatacaaaatatggagctcgtccgcttagaagagcgatgcagacagaactggaagataaactggcagaggcaatcttaaatggagaagtgcagtcaggacaacagatcgaagccggggtttctggaaaagaaataaaattttacttaaagaatacaaattaagtagaaaaagaaaagcagatattatataatacaaacagaagaaaagagtatccgctctaagcagtgcagatacagaaatacctaggaggacaaggaaaatggcaatcgtaaaagagttattacgcacagaagaagacggaagactgagttttggagactatacactggcgtctaaaacaaagctggataatttcgaatttcagggcgacttatataaagtgaagacattttcagagatcacaaaattagagaaaaatggcatgtttgtatatgaatcggttccgggaagtgccgttgaacatctgaagattacagacacagaagttgtattccggatttccgcaccggaggatgttcagtttacactggagcttgcgccggaaagtgagtatgaggtgcttttgaatggagtatcagcaggaaagatggctacgaatttgagtggaaagttgagcgtcagtgtggagatcagtgaaggagaaactgttgacgtaaaagttgtgaagtgctgatcaggacgaaggaatcaacagatatttataagagcagggagctggagctgtagtcaaacagcgttcagctcttttttatggaggagtttatggcaaaaggaaagaaaagtatttttttctgtcagaattgtggacatgaagagacaaaatggctggggcagtgtccggcctgcaaagaatggaatacctttgcagaagaaaaaatcagtacaggattaagccgaggaacaaccattgctgccaggcagaacaaggcagcagaagtggttcctctctctcggatttgcgcggaagatgatacaagagtgtccacaggaatgaaagaattggaccgagtgctgggcggaggtatcgttgcaggatcccttgttctggtgggtggtgatcctggaattggaaaatcaacgcttttattacaggtgtgtcagaagctgtcggttacaggcaagattttatatatttcaggagaagagtcacagactcaaattaaattgcgggcaaaccgtatgggaacatttacagagcagatgttactgttgtgtgagaccaatttagatactatacgaagcgcaattgaacgccagaatccacagcttgtaattatcgattccattcagacgatgtataatgaagaagtgtcttctgcgccagggagtgtctcacaggtaagagaatcgacgcacgtactaatgcaattggcaaaaggtttgtcaattccgatctttatcgtagggcatgtgacgaaagaaggaacagtagcaggtccaagggtgttggaacatatggtagatactgtactttattttgaaggggacagacatgcatcgtatcgaattttgcgtgcagtaaaaaaccgttttggttctaccaatgaaatcggtgtgtttgagatgcgcagagaaggactggcagaagtggaaaatccttcagaatatatgttgagtggaaaaccagaaaatgcatcgggctctgtagtggcttgctctatggaaggcacacgtccgatattgattgaaattcaggcactggtctgtcagagcaattttgggatgccaagaagaactgctgcgggaacggattataaccgtgtgaatttgctgatggcggttctggaaaagaggattggactcccattatcgaattatgatgcctatgtaaatattgccggtgggattaaaatgaatgaaccggcaatcgaccttggaattatcatggctctggtttccagttataaaaatcgagcaattgatgaaaagatgatcgtttttggagaagtcggactcagtggagaagtgcgtgcagtcagtatgcctgagcagagagtggcagaggcgaaaaaattaggattcaaaacatgtattcttccgaaagtatgtatggacatggtaaaggggatacaagggattcaattactgggcgtaggtaatatcagtgatgcgatcaacctcctctaaaaaatagaagaaaaacagatttttaaatagagagtgaattgtcaaaattattttaactaaataaaaaaacaaaaaaacattgacaattcacttttcccgtgataagataccacttgtcgctgagacagaccgatgaaaagaacaagcccaagggctactgtgggacaggatgcgagagcagattgctgtacaaagtgaaaaaagttcttgacaaagagaagtcaatgtgataatctaaataggctgacttgtgagggagaaaaaatccggaacagacagtgaaaagaaaaataaaaaagttcttgacaagtgagaaacagcgtgataaaatgtcaaagctacttcttatcaacaagaacagcgaagaaccttgataattaaacaatagacaacaaccttgaaaatttcttaagagaagattttttaagaacagcatctaagagatgcacccgtcacatgagaatgtgacagacagtaaaagggatgaattagctagtagttaattctgaccggaacgaacacttttaacgagagtttgatcctggctcaggatgaacgctggcggcgtgcttaacacatgcaagtcgagcgaagcgcttttgcggatttcttcggattgaagcaattgtgactgagcggcggacgggtgagtaacgcgtgggtaacctgcctcatacagggggataacagttggaaacggctgctaataccgcataagcgcacagtaccgcatggtaccgtgtgaaaaactccggtggtatgagatggacccgcgtctgattagctagttggtggggtaacggcctaccaaggcgacgatcagtagccgacctgagagggtgaccggccacattgggactgagacacggcccaaactcctacgggaggcagcagtggggaatattgcacaatgggggaaaccctgatgcagcgacgccgcgtgagcgatgaagtatttcggtatgtaaagctctatcagcagggaagaaaatgacggtacctgactaagaagccccggctaactacgtgccagcagccgcggtaatacgtagggggcaagcgttatccggatttactgggtgtaaagggagcgtagacggcatggcaagccagatgtgaaagcccggggctcaaccccgggactgcatttggaactgtcaggctagagtgtcggagaggtaagcggaattcctagtgtagcggtgaaatgcgtagatattaggaggaacaccagtggcgaaggcggcttactggacgatgactgacgttgaggctcgaaagcgtggggagcaaacaggattagataccctggtagtccacgccgtaaacgatgaatactaggtgtcgggtggcaaagccattcggtgccgcagcaaacgcaataagtattccacctggggagtacgttcgcaagaatgaaactcaaaggaattgacggggacccgcacaagcggtggagcatgtggtttaattcgaagcaacgcgaagaaccttacctggtcttgacatccctatgaccgctctttaatcggagctttccttcgggacagaggagacaggtggtgcatggttgtcgtcagctcgtgtcgtgagatgttgggttaagtcccgcaacgagcgcaacccctatctttagtagccagcatttcggatgggcactctagagagactgccagggataacctggaggaaggtggggatgacgtcaaatcatcatgccccttatgaccagggctacacacgtgctacaatggcgtaaacaaagggaagcgaacctgcgagggggagcaaatcccaaaaataacgtctcagttcggattgtagtctgcaactcgactacatgaagctggaatcgctagtaatcgcgaatcagaatgtcgcggtgaatacgttcccgggtcttgtacacaccgcccgtcacaccatgggagtcagtaacgcccgaagtcagtgacccaaccgtaaggagggagctgccgaaggtgggaccgataactggggtgaagtcgtaacaaggtagccgtatcggaaggtgcggctggatcacctcctttctaaggagaaagaagtagaggaagtaagagctattgtttaattatgagggttcatcaagaactcaacttttttggtggcgatgcgctcaggggaaacacccgtacccatcccgaacacgatggttaagacctgagcggccgatggtactgcactggagacggtgtgggagagtaggtggccgccaaaactaaaaaaagaaaaaagaactggtttcaccagtgattagagattaaaagaggttttagtttctaatgactgatgaaagaagcagtcagatgtaccttgaaaattgcatacaaagagaaatatcttatgaaaataagagagttgaataaaattcaacaagacatccgaggtaatgttaacaacattataacaaacaaactattaccaacgcatgtaacgctatacatgtgtcgatgagaaacaacccgtgtttcttgtcagttggttatgctaataagagcgtatggtggatgccttggcactaagagccgatgaaagacgtgataagctgcgaaaagcttcggggaggagcaaatatcctgagatccggagatatctgaatggggaaacctacttgagaagacctcaagtatccacagcccaatccataagctgtggaagggaacccggtgaactgaaacatctaagtagccggaggaagagaaaacaacatgtgattccgtaagtagcggcgagcgaacgcggaagagcccaaaccggagtgcgtgcactccggggttcggactgcagaatcgatgagtgagcctagtagaatggttttgggaaagccagccagagagggtgaaagccccgtacacgaaaggcgagcgagcgaagcaggatccagagtaccacgagacacgtgaaaccttgtgggaatgcgcggggaccaccccgtaaggctaaatactccttagtgaccgatagcgcatagtactgtgaaggaaaggtgaaaaggaccccgggaggggagtgaaagagaacctgaaaccatatgtttacaagctgtggaaccgctttatatgcggaaccgcgtactttttgtagaacggtccggcgagttacgctggctggcgaggttaagcactgaaggtgtggagccgaagggaaaccaagtctgaagagggcgaaatagtcagtcggagtagacccgaaaccgggtgatctatccatgtccaggttgaagttgccgtaaaaggcaatggaggaccgaacccacatccgttgaaaagggtggggatgaggtgtggataggggagaaattccaatcgaacccggagatagctggttctcctcgaaatagctttagggctagcctcatgcaagtcttacggaggtagagcactgaattcctaagggggcgtcaaagcttaccaagggatatcaaactccgaatgccgtgtagatggtgcatgggagtcagactatccgagataagttgggtagtcaaaagggaaagagcccagacctacagctaaggtcccaaaatgtgtgttaagtggaaaaggatgtgggatttcgaagacaactaggatgttggcttagaagcagccatccattaaaagagtgcgtaatagctcactagtcgagaggtcctgcgccgaaaatgtccggggctgaaacacactaccgaagcttaggaattgatgaatgtcaattggtagaggagcattcttaacggggcgaagctgtaccggaaggagcagtggactgttaagaagagagaatgccggaatgagtagcgagaggaaggtgagaatccttccggccgaatatctaaggtttccagagtaaagctgatctgctctgggtaagtcggggcctaaggcgaggtcgaaagacgtagtcgatggataacaggtaaaaattcctgtactatatcataacagaactgtggggacgcagacagagagcataagccgggaatggaaaaaccggtacaagcgaggtaggagtgcatcaggcaaatccggtgtacaatctgaagacgtgacgtggggcgtaaagccggaagtatgtgagctggctgccaagaaaagccgctattgtttatgatatacccgtaccgtaaaccgacacaggtggatgaggagagaatcctaaggccgacgggagaagcattgttaaggaactcggcaaaatgactccgtaacttcgggagaaggagtgccatgtaaaagtggccgcagagaattggcccaagcaactgtttagcaaaaacacaggtctatgcaaaaccgaaaggtgaggtatatgggctgacgcctgcccggtgctggaaggttaaggggagaggttagtcgtaaggcgaagctttgaacttaagccccagtaaacggcggccgtaactataacggtcctaaggtagcgaaattccttgtcgggtaagttccgacccgcacgaaaggcgtaatgatttgggcactgtctcaacaatgcacccggtgaaattgaaataccagtgaagatgctggttacctgcgccaggacggaaagaccccatggagctttactctagcttgatactgggattcgatattgcatgtacaggataggtgggagactgagaactgatgacgccagttgtcagggagtcactgttgggataccacccttgtagtattggatttctaaccagcagccgtgaaccggctgggggacaatgtcaggtggggagtttgactggggcggtcgcctccgaaagggtatcggaggcgctcaaaggttccctcagaatggttggaaaccattcgaagagtgcaaaggcagaagggagcttgactgcgacaccgacgggtggagcaggtacgaaagtaggacttagtgatccggtggtataaagtgggattgccatcgctcaacggataaaagctaccctggggataacaggcttatcactcccaagagttcacatcgacggagtggtttggcacctcgatgtcggctcatcgcatcctggggctgaagtaggtcccaagggttgggctgttcgcccattaaagcggtacgcgagctgggttcagaacgtcgtgagacagttcggtccctatccggcgtgggcgtaggatatttgagaggagctgcccttagtacgagaggaccggggtggactggccgctggtggatctgttgtattaccaaatgcatagcagagtagccaagccgggacgggataaacgctgaaggcatctaagcgtgaagcccccctcaagatgagatatcccataacgtcaagttagtaagaccccttgaagacgacgaggtagatagggcagaggtggaagtgtggtaacacatggagctgactgttactaataggtcgagggcataaccaagcaaggtgataggaaaaggatggattctttgtatgcagttttgaaggtacaggatatatagatggaatgagagagcagcaccgtcaggtgttgtttttttaatgcagaaaataacgaaatttgtcgatgagaagttcgtgagtttcattagaaaaaatggtataatcataattataaaggaagagaggggcaaaatatatggacaagataaaaaagaccataagatatgtagttttgttgatagggatatgtattttatgcataggatgtggaaaaaagtttgatgcaagtggatatacaaaggcaattttggatgtaggttataaaaatcaaacgggaaagtacgtagagttaacaggagcagataaaaaagatgcagataaaatatttgaagataatttgaatttgatgctgcaggaatttgcagggtatgaattgccggatgagttggaagaaaagtatagagtcttgtttcaagatatgatgaaaaaggtaaaatatactgtcagtgaagccaaagaggatgataacaagaactttacagtggatgtcacagtggaacccatgttgatttttacggaaacatatgcggaatttcagaaacagtcagaagaatatgcacgtcaggtttcaaatgaggtgatgaagggtgcatcgatgccttcggatcaggagatgcagaatcatgtttttgaaatttatcatacgattcttcgtaattatttagacaatggaatgaaatatggaaatccggagacggttacggttcatgtaattaaaaatgaaaaaaatgtatatcacatttctcaggaagatattacaaaattagacgagaaaatgatgacaatggatgtagttgaagagtagaaggtgtgcacctggatgatttcgggtgcattttttaataacatgagttcaaatattttgaattgtagaaaaaattcaaaaatttccttgacaaatccagaaataacaggtatactaaacaggtattcaagagatacattttataggggattggtcaaatggtatgataggggtctccaaaacctttggtgggagttcgattctctcatcccctgctagaaaccgtcgattttcggcggttttttattattaataaactagaatttatctgtttgcataatcaagcataatctttttacagttactgcaatgataggcttcacaatgaggtagcccctccgaacctttgctcaattccagatcatcgtgttttttaatccggaaaagatttctgtttggattgttaattgcaaaagtaatatctctcgagctcattaagaaaccttttatcatttctttaccacaatatgggcacttcatattatttcacctctttcaaattctaaattcactttgagcgactttttctattaccctaagaataccataatacagcacccactgctattcttttttctacaaatggctgtcatttccacctgtctcatctcgttttctaacatgcgagtcatcttttgttgtattctttcttccggctccttttccataaattagtttatttttcatccaattttggtaatctctcaaaagcaatactatcatatgtgataaatcctaaaatttttgaacgaagagtcttgcattggcaggaggagcagtattttgttccgctttttttgtataaaaaataaaaaaatattaagaaacaatctggattgaatatgttatattaaaaaaaagtaatctttagattgaaaatgtagaacaaccattcaagaggaggaatatgtatgaaatgcccacattgtggaatggaaatggtagaaggaaaattatgcagcaattctgctttgtggtggaagcaaggggcaggatacaatgtttgcataaatgatgaagggttttggactggaataacaaatggttatagaattgcgggatttcattgcaggaattgtaaaaaaataataatagacataggcaacaatgcaagcaaataaaaaagaagaagttgacagaggagtggttattgatgaaaaaaggaaagcaggtttttggcatattacttctattatctttgtttatgttagcacagtatatttaccgtttgggtattagtgataaaattaaaagtgaaaaagatgtaattgcttctgatgcgggaggagctgatattataatgacgaataaacgatatatcaaggagctgatgaaaagaaagctctggtagctttagatcgagtgatagaaaaatgaactccgaaatattagaattccatgaagcgctggaaaaataactgaaaaccctttatttggcgacatttgaagttataaaaatagactgctgcaattcgaaacaggacacaggtctatggggaactgagcattatgtatgagggatgcttaccagaataataaaaaattcagaaagacgggcaagatggatatactcccttctaggtagacaagtaaaataataaaaacttgtcacttaggagggagcatattttatgtataaaaggaaaatatttgctgaggataagatatatgctgtaagtaaggaatcaaaaaagattacccgattgcagtgtgaatcacaagatacgaaagatgatcttgaattgttaaaaaagcaattggtagtctaggaaattcgctgtgtagttttgttccatccaaactacggtactccaaaaatgactgtagaattgtggaatctgtgggggccgaaaaacagttggaaattgtatgagtccaatggggatttaagctcattgtgtgaaaccatatatctagacgactatagattttgattttactgagaaactcaaaaatctcctcaatgaggaattcaagtccaccatccaggtgtggtttggtgtttagatatcatatttataagtatttgttacaaaaaagtaatatagtttgaaaaatacaaaaaatcaacctatttcatgcgaattataatcatatattgatagtagtatgagattttgatagaatgtgtacataaataagagggaattcctaaaataattattaaaaaaggagaaaaggatatgaaaaagaaaaaacttatatgtttatgtttgtcaagtttgcttacaataggacttataactggttgtggaagtggtacatctgacaaaagtgaagatgcaaatacacagacagaagcaaatggtggagagtcaggagataagataactcttcgtatggcatggtggggatctcaaacaaggcatgatgcgacgaataaagtaattgagatgtatgaagaggcgaatccaaacgtggatatagaagctgagttttatgattttgacagctactttacgaagctggatacactagtggcagccaacgatacatgggacattttccagatgggaggaaatttccccaaatatgaaaacagtattgagacattgggtggttacatagaggatggagtaattgatgttagtgatacgacagatgccttcttaaagacaacacaaaataataatggtgatcaaatgggaatttctgttggtaccaatacatatggaatcgcttatgacccggcaatgtttgaggaggcaggtgtagaggaaccaacagataattggacatgggatgaatggaaagaagcttgtttgaagatttcagaaaaacttggtgtatatggaagttctaagatggataactttattgcaggtgtgacacaaagagtatctcaggcagaaaaagatgcaaacttttttaatatggaaggaaccggactggcttgggatgatccggagccacttgcagattactttgctatgattcaggaactgacagaggctggagcttatccggatgctggtgcaattaaggaaatcaaagacattgaaaatgattatcttgtaacaggtgatgcagcaatgacatgggttgcatccaaccaaattaattctattgtaaatgcttcaggaagagaaattaaagttgctccagttccaagaattgaaaaagatggagcttacggaatgattgttcaatcatcacaaatgctttgtgtatccaagacttcgaaacacaaggaagaagcagcgaaatttatcaattactttgtgaatgatattgaagcgaataaggtactgaatggagaacgtggcgttccgattatgacagaggttagagaaacggtaaaagctcaagcggatgacgcaagtaagtcaatatatgactttgttgataaaattggtaatttcccagtagaaaacagtaatgtaatcagtccggagccgaaaacagaaattgaagattatgacaaattgcttattgaaaaagttcagtatggtgagatgactccagaggaagcagcaaaagatttgcttgaatttgcaaaaggaaaattctaacatagctattgtttctgtagtagcataatatcgtgataaattaggatgtatgaggggcagaaatatttggaaagacagatatttttgcccgtttttatctgaaaagacgattggtgaaggtggattataattatgaaaaaacaacgtgattttaagaaaattttatatagtaataatgtagccgggtatgtcttttcgttgccattcatagtagggtttctcggctttacattgataccaattttggtatcgatgtattattcctttacagattacaaattaggtcaggaattatcatttataggattaaaaaattatattgatttatttgcagatgagcgattcatgaattctatgaaggtaacagttatttatgtagtgatttctgtacctgttaagcttgcatttgctcttcttgttgcatattttctgacaaagaaaagaaagggtgttacactttaccgttctttatattatgttccgtccttaattggaggaagtgttgcggtggcactcgtatggaaaacaattttttcaagaagaggacttgctaatgcaatacttgccggtcttggatttgacaaaatatcatggctgggtaatccgaaaactgcaatgggaattctgattgctatggctgcgtggcagtttggttcctctatgattatttttgctgctggtttaaaagaaataccgactacatattatgaagcagctgatatcgatggagcgaataagtttcagcggtttatcaagattacattgccgtgtctttctccgattattttgtataacctggttatgcagacaatttctgcatttatgtcatttacacaggcttttgttattacacaaggcggtccaaatgattctacaaacttttatgcattgtatgtctataatcacgcgtttaagtggtcaaatatgggatatgcgagtgcaatgtcatggattatgttaatactaatcagcgcacttactctgattatttttaaaacatcgaaattttgggtattttcagaatctgaaagctaggaggagaaagcgttatgagaagaaaacatcgtatagaaagtattatatatcatgttctaatctgcggtttcggaattatcatgatatatccggtattatggatgatcagtggtgcatttaaaaataatacggagattttaaatggtggtttgagcctcatcccagaagtttggagatgggaaaactttattaaaggatggtctggatttggcggaatttcttttggaacattttttaaaaattcattgattgttgcaggtgtttctacatttggaacggtcatcagttcagcatgtgtagcttatggattttctagaatccggtttaaaggaagtaaaatctggtttacagcaatgttatgtaccatgatgcttcctgcacagattattttggtgccgcagtatattatttataataagcttggatgggttggaacatatttgccattgattttgccacacttttttggtcaggcattttttatctatcaaatgatgcagtttatcaaaggaattccaagagaactagatgaagcagcaactattgatggctgcagtcgatattccattttttcacgaatcattcttccgctcttaaagccgtcaattgtaacaacgatcatcattcagttttattggaagtgggatgactttatggggccgatgatttatttaaataaaccggaaatgtatacggcttctttagcaattaaacaattcgcagattcctcatctacaacggattatggagcgatgttcgcaatgtctgcattgtccctaataccggtatttttaatattcttattttttaacaagtatttggtagaaggaatcagcagcagtggtttgaaaggataatgataatgattaataatccgattttagaagggttttgtccagatccgagtattgttcgtgtaggcaatgattattatatagcagtttcaacattcgaatggtggccgggggtaaaaatatttcattcaaaagatctacaaagttggacgcagttaggagcagcattgacccggacaagtcagttgaatatgttaggagatcccatgtcaggtggagtatgggcaccatgtttgagttatgataatggcagattttatttgttatttactgatgtgaagaccaaaaaaggtcgtttttataatacacacaattatcttgtatggacggatgatattcaaggggaatgggcggaacctgtttatttgaatagtgtaggttttgatccatctttgtttcacgatacagatggtaggaaatacttgatcaatatggtaaatggatttaaaggagttcttgttcaggaacttgatcctaaaacatggaaactgatcggtgaacaaaaaaaggtttatgatggttctggtataggatgtacggaaggtcctcatatgtatcatattggtgaatggtactatcttctgacggcagaagggggaaccggatatgagcactgtgtaacaatcgcacgttcaaaaagcatttgggggccgtttgagacggatccggagaatccgctccttacttcggataaagagcataaagaaatgttgcagaagtgcggacatggagatttggtacagacacaggacggagaatggtatattgcacacttatgtgctcgtcctcagacaggtgaaaatcattgtgtgttgggacgagaaacagccttgcagaaattagtattgaatgatgacgggtggtttcgattgaaatgtggtggaaaatatgcacaaaatgagacggaaagcccgagaggaattttggaagagtctggaagagagaaggaggcattggataaattttctgatgtgaaaaagtgggacagattacagggaggcttttcttcgccgcgaagacctcttggaaatgatgccagtttaagtaaacaaccggggtatttgcatttgattggaagagagtccttgaattctttacatagagttacattggcagcaaaaagacaaacacaattttgtactgaggcgagcacgaaaatgaaatttaatcctacatatgaagagcagttagcaggacttgtttatttttacgatgcgatgaacttttatgtatttggcaaaactgtggatgaggagaagaattccattcttgtactgctgaaaagtaatacgggagtcattaccgatgagatagatcctattatgcttgcatcagatgaagaaatcatacttcgggcagagactgatcagaagggggaaagtgttacattttcttattgtctggatgggagatggagtacggcaaaagcagactgtacaacagaaatactgactgatgagcattgtagaggatttacaggagcacattttggaatgtatgtacatgatatgacaggacgtgcacttgctgccgatttcgcatggttttatctgggtgcaaaaagtagtttgaaataacagaaacagagggacgacagggtatgagtagggtaacatttaaaacaagcgatgatcttgttcagaaattgtttgatacagctgaagaaaaattaaaattgaatttgaaggatttttcaggaagaactgttttaatagaaggcggtggatatgaaaaaatctggttggagacacaacctatgggtggggagatgtatgcgaagcgaaacatgaccccggcattgaataatcagctcctttttatggaataccagagagaggatggaaggattcctggaagtattgctttgataaacgggaaaataacaccacagttcaataaattccagggattttgttttccagagccagcacttaatatgtactatttgctggggaaagatgaagattatttggaattattgcaccggacgctggagcggtttgatgcgtatttatggaaaacaagagattccgatggagatgggtgtctggaaacttggtgtaaatatgatacaggagaagatcatgcaatgaggtacatggatgcaccagatgcatgggaagcagaaatccctccaagggggtgtgaagcagtaccaattgcgtctatggatgtgatgagctattcttattcctgtcgtagtgtccttgcagaaatcagcaggatgaagaatcaaaaagaggatgagaggttatgggcaaaaaaaagtcttcaggttcttcagaggatgaaagaatatctttgggatgaagcaaaaggagcttattttgacaaagataagcatcatcgtcagatgccgattctcatccataatacattacggactatgtattggggaagcattacacaaaagatggcagatcggtttgtaaaagaacatttgtgtaatccaaatgaattctggaccagattaccattaccatccgttgcggttaatgaccctatgtttcggaatgtaacgacaaataattggagtggtcaggtagaagccttgacttatcagagagcgattcgtgctctggaaaaatatggatattatgagttgttgccaaagttgggaaataaattgttcaaggcaattggagaaaactgtgtgtttgttcaacagtatgatccgtttacatctgttccatcatcgattgcactggaaggagaacaagatgcatatggaccggcaatgctttccgttctggaatatatttcacgcatgtatggtgttcatattgataaggaaaccatatgctggggaagctgtggaaaaagagataccgaatatgagcaagaatggaacaacatcaattatcggattgtaaatgatggagcatacgctgaagcttttctgaatggaaagaaaatattcagcgtacccagtggaaaacgtgtaattaccgattataggggaaatattttgaatgtacaatcactggaagatcctacaaaaaaaggcttattttaggttgatttgttcgccggcgtatgactttggacgttcactctctttgagaaaacgtttgcggtatttaagaggggaggtttcggtatatttccgaaagattttctcaaagtaggtgagactttcatagccaaggctagaggcgatttcagtgatattcatgttgctttttataagaagattttgtgcctgttgaatacggttaaggttgatatattcgttaacggtatatccggtaaattctttaaaaattcgactgagatagcttttgctgatataaaaatgctgtgcgacggtatccagtgaagaggccgtatcataatgttcgctaatataagaggctacttctgaaactttctgatgagtagaagaagtagaaagtgcggttgtactggcagttaaatgattattattccaaaatctttgagcgaagaagagaagacgggcgagctttgtcatcgccatcatacgataaccggggtttttatcacggatttcacccgcaattccttctaaaagggatagtacatatgactgatttttggggcaaagttcaagtactccttgatttttacaaaaaaaatctgagagaaccagttcaccggtacaaccaaggaatgaagaaaagggttcttcttttagttcaatgacaatgcgttcatgatgtgaatcgttatattgtcctgtctggtgaatttggtttcgattgataaatacaagagacccctttttgacatgaaaaatctggttttcaataaagtagtatcgttcaccgtcaataagataataaatttcatattcttcgtgaatgtgtttgtgtggcatattaaaatcgtaattacggacgatacgatcgattgttagacctacatcagattctttgtaaataatattacgcatacggaaaactcctaaaagataaaataatttgaaaaacaacaaaaaaagaagaaatagtataagaatattatactatatatgagtataatgtctagtaaagaagttgaaaattcttatcattttggaaagaagggaatataaaaatgaaatatcagaaaggaaaaatgtcagaaatacagattgcctatattggaggaggttctcgcggatgggcatggacatttatgacggatttagcacttgaaccgtctatgagcggagatattcggttatatgatattgataaaaaggcagcagaggcaaatgaaattatcggtaataaggtatctgcaagagaagaagcagttggtaaatgggattataaagcatatgatgatattaaaacggctctgaaaggtgcagatttcattgtattgtctattttgccgggaacatttgatgagatggatgcggatgtgcatatgccggaacgtttggggatttaccagtctgtgggagatacagcaggtcctgggggaattatacgagcgcttcgtacaattccgatgtatgttgaaattgcagaggcaatccgggaatatgcaccagaagcatgggtaattaattatacgaatccaatgagtctttgcgtaaagacactgtatcatgtatttccgaaaatcaaagcatttggatgttgtcatgaagtgtttggcacacaaaaagtattaaaagaaattgcggaagagaaatttggaattgaaaatattgaacgatcagaaatccaggtgaatgttctcggaattaatcattttacatggtttgattatgcttcttataaaggaattgatttatttccggtttataaagaatacattgatcaacattatgaagaaggtcatcaagaacaggataagaattggatgaattctagctttgaatgtgtacatcgtgtaaaatttgatctattccgtcgatttggtttgattgcagcagccggagaccgacatttggcagaatttatgccgggaaatgaatatttgaacagtccagaaacggtaaaaaattggaagtttggattgacaactgtcgattggagaaaagaggatttgaagaagcgattggagaaaagtcgaaaactggtggcaggagaagaacaagtagaattgaagcctacaggtgaagaagggattcagttaattaaggcactttgcggattgagaagaatggttagcaatgtgaatattccaaatacgagtttacagataaaaaacttgccccaggaagcggttgtagaaacaaatgcagtgtttgagcgagatgcgattcgtccgattgtggcgggagaaattccagaaaaagtgcgtgaactgattttaccgcatgtggaaaatcatgagtatacgttacaggcagctcttacatgcgataaagaattggttgtcaaagcatttttgaatgatcctatcgtaaaagggaaaaagtgtaaagaagaagatatccgaatgcttgtagatgatatgattgcagcaacgctggatttccttccggaaggatggaaatagtcgtcggataaatgtggaaaagaccttgtagtgatatgagttgatatcatgacaaggtcttatacttatacggcgaagaaggagataagagatgagaaatagaaaggaagcaaagaaacgagcagaagcgttagttgaacagatgacaatttctgagatgataggacagctgaggtttgatgcacctgccattgatcggttaggaattccggcatataattggtggaacgaaggggtgcatggagttgccagagccggaacagcaactgtatttccgcaggcaattggaatggcggcagcatgggacgtggagatgatgaaagaaattggtgatgtcattgcggaagaggcgagggcaaagtataatgcttcgatacgacaggaagatcgagatatatataaaggactaacattatgggcaccaaatgtaaacatcttccgggatccacgttggggacgaggacaagaaacatatggggaagatcccgtattgacggcaacgttagcggtttcttttattaaaggacttcagggagatggggagtatttgaaaacagcggcatgtgcgaaacattttgctgcacattcaggcccggaatctcttcggcatttttttgatgcaaaggtgagtaaaaaagatttgtatgaaacttatttacctgcgtttgaagcgtgtgtaaaagatggtgatgtagaagctgttatgggcgcatataatcgaatgaacggggaaccgtgctgtgcgagtcatgaactgataaataaaatattgcgtggtgaatggaaatttcaagggcattatgtgtcagattgttgggcaatacgagatttccatgatcatcaccatgtgactaaaaatggtgtggagtcgtcggcactggcattaaatatgggatgtgacttgaattgtggctgtacttatctgtgtttaaaggaagcacttaagaaagggttaattcaggcggctacgttgaagaagtctgtggtacgattgtttactacgcgttttctattgggaatgtttgatgaaacagagtacgatcaaatttcttatacacaagtggagacaaaggaacatttggagttatctgagagagcggcaagggaaggcgtggttctgctgaaaaataatggagttcttccaattaataaagatgaaatcaaagtaataggagtgattggtccgaatgcaaatagcaggagtgctttagaaggaaattatcatggtgttgcatcgagatatgtgacagctttggaaggaattcaggattatgtggaagacgacgtgcgggtgatgtattcaaaagggagcaatctgttcaaggaaaatgaggagtctttagcacagaacgaggataggatcagtgaagcattagcagttacggaatgcagtgatatagtcgtattgtgtatagggttggatgaatccttggagggcgaagaaggagataccggaaacgcgtatgcatctggtgataaaataaatttatcatttcctaagggacagcaaaaactgttggaaacggttttaaatacggataaacccgtaattgtatgcaatttttccggtagtgctatggatttgtctttcgcagaggaacaggcgtcagcaattcttcaagtatggtatccgggagcgctaggagggagagctctggcaaaattattattcggggatgtgtcaccgagtggaaaactacctgtgacattttacaggtcattagagggaatgccggaatttgaggattattctatggaagggcgtacgtatcggtatatgaaagaagaaccgctatatccatttggatacggtttgacttatggaaagatacaggtagaatgggcaaggtttgaaaataaaccttctcgaaaagaaaacttgaaaatgcaggtatatttgaaaaactatggtgaaaatgaagtgcaggatgtattacaggcatatatccgtaatgaatccagacatgcaccgcgaaatccagttctgtgcggatttttaagagtgagtctgaaagcaggcgaagaaggaaaagtgtcattggtaattcctaaaactgcattttatgtgataaatgatgagggagaaaagatttttgacgcagttaccagtacgatttatgtaggaacatgtgcaccagatagtcgcagtatcacattgactggacagaaaccttatgaattaaagattgagtggtagcttatctgaaagtattgaatataaattacctacatggatgaaagatttggaacatatagcttatattctatattaaatagagctggtcttttttatttgacagaggtaaaatatttatataacacattttgaaaaggagagggcagaaatatgaggaaactagaaaataaggttgcggtgattactggtgcttcgaagggaattggggaaggaattgccagtgtatttgcaaaatatggagcgaaactggtgctcgcagcaagaggagaaaaagtgcatgagcttgcagcacgcctgaaagaacaggggacagaggtgattgggatccaggcagatgtttcgaaaagagaagaaatggaaaaattggcgaaaatagcaattgatacattcggtacaattgatattctggtatctaatgccggaatctgtattctggaagattttatggatgcagaggatgaaacagtcagagatctgcactttgatattaacattaagggaacatggaatgctgtgaaagccgtgcttcctgagatgattcgaaaagaaacggggaagattgtggtgatgagttcggtaacaggggatcttgttgcagatccaggggaagcagcatatgcgacttcaaaagcagcattggttggatttacgaaggcaatggcgagagaggtcgcaatgcatcatatcaatgtgaatgcaatctgtccgggatatgtgcggacaccgcttgtagaaggaatggcacggcagtcagatccggatgatccggagcgtgcaatccaggcgattgcagatgcagttccacttggcaggctggcagcgccggaggaaattggagaactggcagcttttttgagttgtgaagaatccagttacattacgggaacgcagattgtgatcgatggtggaagcacgttgccagagacaagttctatgggacaataaaagaatttatcagagaaaaaagtctttgacttttttgaaaacgtgtgatagagtttataaggtttgaataaagtgtgaatgattattacatttgcactttttttatgcctggaaaacatacaaatagaagatacaaaagagaggagaagaattttgcttacgatttcagattatgtgaaagcaaagacgttggaagaagcttacgaattgaatcaggcgagaaacagccgtgtaatgggcggaatgatgtggatgcgtcttggaaatgcgagaataaagaccgtgatcgatctttcagatttgggtctggatcagatagaagaaacagatcatgtttttaagattggagcaatgtgtactttaaggcagttggagaagcatcagggattgagagagatgtatggagacggaattgcagaatgtgttcgtcatattgtaggagtgcagtttcgaaatcaggcgacagttggtggaagtatatatggaagatttggattttcagatgtattgaccgcgttgttggccttggacacatttgtagagttgtataatggaggaatcatccggctttctgaatttgtgaatcgtaaaaaagataaggatcttcttctttctattatcataagaaaaagtaaacggtcttttcgctatgattcagtaagacaaacgaaaacggattttccggtgatcgcatgttcggttgttactggaattgtgaatggagtggagtcctggtatttttcagtgggagcaagaccaatgaaagcagcattgatagaaaaacagtgggagattccatccgatatttcggaagaaaaaatcagagaatatgcaaaaatcgctgcttcagaatttgaatatggaactaatatgagaggcagtgcacagtatcgaagacagttggcagaagtcctgatttttcgggagatgcgttcgatcatcacggagggcagagcatggaagtaaaatttaaattgaatggaaaacaggtatcagcagaagtatctggagataccatacttttagatgtgctgagagatttgggatgctatagcgtgaaatgcggctgtgaaacaacgaattgcggactttgtacggtttggatcaatggcagatccagactgtcatgttccattctggcagctggcatcgaagggcaggaagtgacaactttggaaggcctgaaagaagaggcggaagaatttggagcatttctggcacaggaaggtgcagaacagtgcggattttgttctccgggatttattatgaatgttctggctatggtgcgggaattggaaaatccaacagtggaagagatgaaagaatatcttgcaggaaatttgtgcagatgtaccggatatatgggacagcttcgggccattcagaaatatatggctgtaagaaagcagatggagaaagaaaaggaggttcaggcatggggaacagagtggtaagccaggcaatcccaaaagtggattataaagcgctggtaacaggaaaagcagtttatacagatgacctggcagcaaaagacagcctgattgtcaaagtgcttagaagtccgcatgctcatgcactgatccaggatatcaatctgacaagagcagaactggttccggatattgaatgtatcctgacatacaaagattgtccggacaagagatttacgatggcaggacagacttatccggagccaagtccgtatgacagactgattctggatcagagagtccgttttgtgggggatgcagtggcaatcgttgcaggccgtacgaaagaagctgtcaacaaggcattaaaattgatcaaggtaaaatatgaagtattagagccggtactggatttccacaaagcgaaagacaatccaattctggtgcatccggaagaaaattggaaaagcctgtgtccggtaggggcagataatcggagaaatctctgtgcacatgatgtctgtgaagaaggaaatattgaagaagttcttgcagaatgcgagtatgtgattgatcaggtctaccatacaaaggcgaatcagcaggcaatgatggaaacgtttagaacgtatacatatctggatacatatggaaggctgaatgtactttcttccacacaggttccattccatgtacgccggattcttgcaaatgcattggatattcccaagtcgaagattcgtgtgatcaagccaaggatcggaggaggttttggtgcaaaacagacggttgtatcagaaatttatccggcactggtgacatggaaaacaggaaaacctgcaaaaatgatctttacgagagaagaatctatgatcgcatcctctccgcgtcatgagatggaggttcatgtccgtttgggagcggataaagacgggattattcagggaattgatgtttatacactttccaatacaggggcatttggagaacatggaccaacaacagtcggactttccggacacaaatccattcctttatacggacagacaaaagcgtttcgatttgcgtatgatgtcgtgtatacgaacgtgatgtcagcaggggcttatcgtggatacggtgccacacagggattgtttgcagtggagtctgcagtcaatgaactggcagaaaaactgaatatggatccagttgtactgcgtgaaaagaacatggtacgagaaggtcagagaatgcctgcatattatggtgagacagcaaatagctgtgctctggaccggtgtatggaaaaggcaaaagagatgatgaaatgggatgaaaaattcccgagccgtgatatgggaaacgaaaaaatcagaggagtcggcgtggcaatggcaatgcagggatccggtatttccggtgtagatacagcatctgtcggaataaaagtaaatgacgatggattttacagcctcttgatcggagcttctgatatgggaaccggatgtgatacaattttatcgcagatggcagcggaatgtctggattgtggaatggatgagatcattgtgcatggagtagacacagattcgtctccgtatgataccgggtcttatgcatccagtaccacttatgtgacaggaatggcagtggtacgtacctgtgaagcacttaaagataaaatctgcgaaaaaggtgcacaatatctggaatgtgacgtggaggacgtagattttgacggacagcaggttgtgaacattaagacaggcgcatctatttccagagcagaaatcggaaatcgtgtcatgtgcaataatgaggacgcactttatgcaagtgaggcctatagttcgccggtttctccgccgccgtttatggtcggaatggcagaagtcgagattgatcgggaaacaggagaactggaactgatcgattatgtggcggtcgtggactgtggaacagtggtcaatccaagtctggcacgagtacagacagaagggggaatcgcccagggaatcggtatggcaatgtatgaagacatcgtatataatgcaaaaggaaagaattacagcaattcttttatgcagtataaaattccgagtcggcttgacgtgggaaatatccgggtagagtttcaaagcagttatgaaccgaccgggccgtttggggcaaaatcgatcggtgagattgtaattaacacgccatcgcctgcgattgcaagcgcagtcagtcatgcggttggggtaaaagtgagagagcttccgattacttctgaaaaagtatactggggaatgcgaaaagaaatataaacaaatctccgaatctggcgtttcgttagattcggagatttgtttatgtatttatttttggcagagttgtttttgaaaagcgatgcgtttggaaccatcttctaccagaatggtgccacattttgtaaatccaagttttacaagtaaattttgcataacaagattttcccgatgtgtatcaatttttaaatttcgacactgggaaagtgcccattccagacaaaatgaagcagttcctttcacagtaccggaagaggcaattcggtgtacaacgccgtagggctgctcgttgagccaatttccatcgtagatcgtgcggtaggtatcatcttcttcaaaggcataatagaaaacagcaagaatcgcatccgaatcaacacatacataagcatggctgtgttggatatcattcataatgagcgcatcactgggataatttgttccccattgagagggattgccatgttctgccataaaagagcgtgcacgtttgtaaatatgagaaattgtatcgaaatcttccatggaagcaagtctgatattcatagatcaaaatcctttcttataatattttttatattgtaaatgataggacaaaaaaaagcaaatttggttgacaaatagtatgaaaagagataaagtataaatgttagataacggcatattgggcttatatgcctgatttatacagatagggagtataaatatagggcagattgcattacagaagcttagagaacaggggaaggcacggtatcacgttatttgaatctattttactatttattaccaaagtatttaggaggagagaacaatgtataggaaaaagttaatgcgtgcatgtttgacaggtatgatggttgtttctattacagcctcaaatgttgcaccggtgtttgcagcagaaccagtggcagagacacagcaggcaggggaaacaatggaagtttccggtgaaattaatttcgctgatgaagaagagggcaagtacattttcgtgccttacaaagaaaacatctcagtagacgactttggattaagtctcgacgtagtgaaaaaatatcttccagagggatatgagctggtagatccagatgctgagtttttaattgcaggtggaaatttcgtttatgcagaagttagaaaagtggctgtagtaagtgcaactgttactatcaatccaagcgagggctattttgaaggatatgatggagcaacaaatctggaaaatgcagggcttcagaatacagattacaaactgggatttcttccaaaagtacaggcaaacaaaggctatgcatttacaggctggaaagtaacaaatgaagcaggcgacgtgatttatacattagatacttccgcaagtgagattgccttcccatatggtgtggcaggacattacacagtagaagcagtatttgagaaagttccggtggaagtatctgcaactgtcacaatcaatcctgtgaaaggatctttcgaaggatatgacggagcaacaaatctggaaaatgcaggacttcaggatacggattacacattgggattccttccagaagtaaaagcaaacaaaggatatgtatggacaggctggaaagtgacaaatggagcaggagaagtgatctatacattagatacttctgcaacagagatcgcattcccgtatggtgtggcaggacattacacagtagaagctgtatttgataaagtaaatgaaaatacaacagcaactgtagtgattgatccggctttgggctattttgaaggatatgatggagcaacagaactgagcaatgagaatcttcaggatacagattacacactgggattccttccaacagtggtagcaaatgacggatatacatttacgggctgggaagtaacaaacaatgcaggagaagttgtttatactttggatgcgacagcaacatcaattgtattcccggtaacagcagatgattatatcgtaagagcaacatttgagaaaaatgcagtagcatcagcatcagcaactgtagtaatcgatccggctcttggatatttcgaaggatatgatggagcaacagagctgaagaatgaaaaccttcaggaagcagattacacactgggattccttccgacagtcgtagcagtggatggctatacatttacaggttgggaagtaacaaacagtgcaggagaagtaatctacagattggatacagtagcatcatctattattttcccaatgaaagcagatgactacacagtaagagcgatgtttgaaaagaatgtggctgcacctgtatcagcaactgtaatgatcgatccaaacgaaggatactttgaaggatatgatggagcttcaacattaaataatgaaaatcttcaggaagcagattacacactgggattccttccaacagtcgtagcaaatgatggctatacatttgttggctgggaagtaacaaagcagtctggagaagtaatctatacattggatacaacagcaacatcaattgtattcccatacggtgtatcagaagattactatgtaaaagcaatgtttgagaaagcagagattccagaagttccggaaacaccagagactccaaataaaccagagacaccagagactccaaataaaccagagactccggataaagaggaaacaggtaaagaaaacggcaaaaaggaagaggctaaaaaagagaataagaaagaaaactctccaaagactggtgatgaaacaaatgcagcagcggcagctctgccagcaggtattagccttgcagcaattcttgcactgttagtaaaaaaattcaaataatttaaagcaaatgtgcttttaagggcaagcaagaagcatagaatagttaaatattttgatgattttaaaaggtggaattctttgggattccacctttttataacgaaaaaggagagtatcatatcgtgatcaaaagaaaaaaattaagtatcgtattggtctttttaatatgtattgggatgataagtggttgtggaacgtctgatgaatcgaaaaagctaacgaaagatgaaaaagcatttatagaagcagttcagaaaggattacaggacagatgggaaatccagaatgaagaggaggagaatggagatgatgttgaaaaacaaaaagaattgcgtcagcgatgtgtaaatacagaactcggggcagtggatcagtatagtgcactggaatttagcgatgaagaatttaaaaaagcagccgccgcttatattgttgcattaaagtctcaaaatgaggcgttgaaaggaatgtattccggggatgaaaaggcggatgaaaactggaaggcggcaagtaagaaacgtgcagtgtcacttattaaatttgtggattactatgatttgaaagtcgataaaaaatacgataaaaatatagaaaagataagaaaagaggcaaaataaaaagaaaatcagatatcactgttttcagattgtactaaatcaaatacaaacgagaatcattcctgttttatcttgtctttcttttaacataatgatatactaaggctcgtaagaaagagaaaaacaattcatgtacattgaaggaggattttaaacgatggcacagtttgaacagtggtcaggatttaacggaagactctggaaagaagaagttaacgttcgtgacttcatccagaacaactacacaccatatgatggtgatgaatctttcctggttggacctacagaggcaacagacaaattatggggagagcttcagaaactgcagaaagaagagcgtgcaaaaggcggcgttctggatatggagacagaagtagtttctggactgacagcatacggcccgggatatattaacgaagaaatgaaagacttagagcaggttgttggtcttcagacagacaagccactgaagagagcatttatgccatacggtggtattaaaatggctgagcaggcttgtacaacatacggatatgagccaagcccaaaactgcatgaaatctttacaaaatatcataaaacacacaatcagggagtattcgatatctacacacctgagatgaagagagctcgtcacagcaagatcatcacaggacttccggatacatacggaagaggtcgtatcgtaggtgattaccgtcgtgtagctctttacggaatcgactacctgatcgagcagaaagagaatgactttatcgaaggtgaaagacacggaatgaaaggaacagatttccgtcttcgtgaagaaatcgctgatcagatcaaagcattaaaagaaatgaaagaaatggctgctgtttacggatttgatatctctaaaccggctacaaacgcaaaggaagctgtacagtggctgtacttcggataccttgcagcaatcaaaactcagaacggtgctgcaatgagcgttggacgtatttctacattccttgacatttatattgaaagagacttaaagaacggaacattgacagagacagaagctcaggagctgatcgaccacatcgttatgaagttcagaatggtaaaattcgcaagaatcccatcttacaacgagctgttctcaggagatccggtatgggctactctggaaatgggtggtatcggaatggatggacgttctatggtaacaaagaacgactaccgtttccttcatacactggagaacatgggaccttcaccagaaccaaacctgacagtattatattcttcaaatctgccagagaactttaagaaatattcttcttatatttctatcaagacaagctctgtacagtatgagaatgatgatgtaatgcgtccggtatggggagatgattattctatctgctgctgcgtatctgcaacacagacaggaaaagaaatccagttcttcggagcacgtgcaaaccttgcaaaatgtctcctttacgcaatcaacggtggtgttgatgagaagactggcgcacaggttgctccaaaatacagcccgatcacatcagagtaccttgactatgatgaagttatggacaaatatgaccagatgatggaatggctgtctaaactgtatgtagatacattgaacatgatccactacatgcatgataaatactactatgaagcagcagagatggctctgatcgatacaaacgtaagacgtacatttgctacaggtatcgctggattctctcacgtagtagactctttaagtgcaatcaaatatgcaaaagtaaaagtaatccgtgacgaaaacggacttgctgttgattacgagacagagggagacttcccaagatacggtaacgatgatgaccgtgcagatgagatcgctgtatggctgttaagaacattcatgagcaaactgaaaaaatgccacacatacagagactctgagccaacaacatctatccttacaattacatcgaacgttgtatatggtaaggctacaggatctcttccggatggaagaaaagctggggaaccactttcaccaggagcaaacccatcttacggtgcagagcagaatggtctgttagcatccctgaactcagttgcaaaacttccatacgaagaagcactggatggaatttctaatacacagacaatcagccctggagcacttggacatgatgatgatgagagaaaagtaaatctggcaaacgtaatggacggatacttcgatcagggagcacatcacctgaacgtaaacgtattcggaacagaaaaactcatcgatgctatggagcacccagagaaagaagaatatgcaaacttcacaatccgtgtatcaggatacgctgttaaattcatcgacctgacacgtgagcagcagttagacgtaattgcaagaacatgccataaagcactgtaatttgtaattcacagggacgtagtacaaacaggatgctacgtccctttttaaatggaaaagaaaggatataaaacagatgaaaggatatatacactcaacagaaagctttggatctgtagacggaccaggagttcgttttctgatctttgtgagcggatgtccgatgcgctgtcagttctgccataatccggatacatggagtatgcagacaggaacgcagatgtctgcagatgaattgttggataaagcgtggaaataccgcagctattggggcaaatccgggggaattacggtcagtggcggagagccgcttctgcaaattgactttttgctggaattgtttcaaaaagcaaaagaacggggaattcatacaacgattgatacaagtggcgcaccgtttacaagagaagagccgtttttcggaaaatttgaagagctgatgaaatatacagatcttctgcttttggatatcaaacacattgatgaggaacagcataaagttttgacaggacatacaaaccagaatattctggatctggcaaaatatttgagtgatatcagaaaaccagtctggatccgccatgtattggttccggagagaagtgatcatgatgaatatttaaagaaactggatgcctttattcagacactttcgaatgtagaaaaggtggaagtgcttccataccacacacttggagagtataagtggaaagaactgggactggaatatcctctggaaggaattgagccgccgacagaagagcgaattcgcaatgcgaatgaactgcttcatacaggcaaataaaaaagtatcgctcatgatcgaaaggatcatgagcgatttttatgaattattctgtttcaacgaatgcgtcttttccaagtccgcacagtggacataaccaatcttccgggatatcttcaaaagctgttcctgcttctactccgttgtctggatcaccaacttcaggatcgtaaatgtatccacatgcttcacataaatattttttcataagataagtcctcctttttatttacgaaatctttttgacatatgtattataaccaaatctatttcaaaagtctactaaaaaagtataaatttgtgattatttataataatagtaatcattattaaaataagaagaactaataagaacagatattacttgagttatgtgagaaaaaaaggtaaaattatttttagaacgtgaatagaaagcaggagaatttgggatgaataaaaaagaaatattagagatccgaaagcagtttacgccggcaaactgtgcgatcacaaggattgccggatgctatgtggatcatgagaaaaataaaaagatggaatcaaaatcggcatttttatctttgcctgaggaagaggcgtttaaatattttgatatttttaaaaagacactctcaggaacaatggggaaaaatatgctgaacatggagttcccgatcgatcaggagatgccgggtggaacacaggaatttttgatgaaattgaaaggaagcaagttggaagacgatatgcttctggaagagttttatgataaagtaatcgctacatatgaatatgctgagaattattatattattttaatccatgcaatgtatgatgtgcctggaagatcttccgataatctggaaatgtttgatgcctctgatgaagtgtttgagtatctgctgtgcagtatctgtccggtttctctgtccaaagcaggcttgagttacaatgcagagatcaactgcattcaggaccggatccgggattgggtagttgatatgccggacaaaggattcttgtttcctgcattcaatgagagaagtacggatatccatggagtcctttactatacgaagaagtcagaggatttacagccggagttgatcgagcagttattaggggcgaggatgccgatgtcagcgaatacacaaaaagagacatttcagatgctgatcgaggatacacttggagaagatggtgattatgagatcatccgcaacattcatgatacattaaatgaaatgatcgaggaacataaagaagagccggagccgctgcagcttgacaagattgatgtacgcaaggtatttgaacaaagcggagtttcttcggaaaagatggaaagttttgatcaaaattatgaagagacagcaggagaaaagacgtctcttcttgcgtcgaatattacagaaacgaaaaaattccagatcgaaacgccggatattgtgatcaaagtaaacccggatcgggcggatttgattgagacaaggatgatcgatggaagacagtgtcttgtgatcgctgtggatgatcacattgaagtgaacggggttcatgtaagaactttaaaacggccgcagaatgaagcggaagaataatatattttatgcaacagtttcagggagtgccctgggactgtttttttaagaaaatataattaagcatctaactaaaatattgtgaaaaatattaaaaaaatgtgaaaaaataatgaaatacttgatttttttggggaatagcactaaaatatcagttagtcatctaactaattaaaggagggtcgatgatgaaatgtgatttggaaaaagttccaaatgtgggattgtttggaatgttggttcatcagagtggactgcgtgcccagaagatgtttgacaaatatggattgaacaaaagtcaggcaagtattctgtttatgctgcatcatgaagagtcggtttcacaaaagccgctttcgcagaaagaactggcaaaaaagctgaatgtgacggcaccatcgatcacatcagcaatccagaaaatggaacgggcagaattcatcaagagagcgccggatgaaaacgatcagaggatcatgcggttgtatttggatgaaaaaggaaagtcttgtattgaacatgtaaaagaagtgacgagaaagatggatgagatcatgttccggggaatcagccaggaagaacagctttttttacgcaggcttctgatccagatgtttgaaaatctgagtcaggaagagtgcatacagtttcatacggcaaaagaaacaaaaaagacggacagaacagggaaggagagcgtatgaaaaatttatttaaatttatcgggcattactggaaagctgtgatcgcaatcgttgcaatactgggagtacaggcctattgtgacctgtcacttccggcgtatacgtctgatattgtaaatatcggaattcagcaaggtggaattgaagatcaggtaccgattgcaatttcagaagaggaatggaataagatgatgttgtttgtatccgggaaagatcaggatacggtggaaaatgcctatcagaaagatgagaattcctatgacaaatcagcatttgtcttgaaaacttctataaaagaagatacagcagaacgggaacagatagaggacatactggcgcttccgatgatggtaacatctggtttggagtcggggagtgaaaaaactcagaaaatagaacaggagctgaaaaagcagattccggaagagatgctttcggaagataccacggtgtttgatattttgcagatgatgccgcaggcagccagagaagaactggtaaaagagattcaaaaagaaatgaaagatatgccggatatgatcctggaacaggcagccgtaagttatgcgagaacagcatatgaagaattgggtatggatgttgacaaaatacagtatcaatatttatttaacacaggcggtaagatgatcgcgttggcatttctcggaatggcagccagtgttcttgtctgttatctggctgcaagagttggggcgagagtgggacgtgatctgcgtggaaaagtatttcgtaaagtggttgggttttccaacaatgaatttgaccatttttctactgcgtcactgattacaagaagtaccaatgatatccagcaggtacagtttctggcagtgatgattttgagaatggtattatatgcaccgatccttgcattgggaggggtttataaagtatttcagacaaatgtttcaatgtcctggatcattgcacttgcagttgttttgattctctgtgttgtactggtgttgtttgttgttgcaatgccgaaatttacaacattacagaaattagtcgataaattgaatctggtcacaagagagatccttacaggtcttcctgttatccgggcatttagtacagaaaagcatgaagaagagcggtttgatgcagcgaatcagaacctgacaaaaacgaatttgtttgtcaatcgtgcaatgacatttatgatgccgaccatgatcctgatcatgaacggggtttccgtgctgatcgtatggaatggagcgcacggaatcagtgatgggcagatgcaggttggagatatgatggcatttatccagtacacgatgcagattattatgggatttttgatgatctgtatgatttctatcatgcttccaagagcaggtgtggctgcggatcgtattcaggagattttgtcaagtaagacagtgattaaaaacccgcaggaagaaaagacattttgtgaagaggaagccggagtgctaaagtttgaacatgtatcattttgttatccgggggcagatgaagatgtgcttcatgatattcattttacagccagaccgggagagacaacggcaatcatcggaagtactggaagcggaaaatcgacgctggtcaatctgatcccaagattttatgatgtttcacaaggacgtattatgctgggcggcgtagatatccgggaagtatctcagcatactctgcgggagaaaatcggatatgttccacaaaaaggcgttttgttctccggagatattgcttctaatattttattcgggaatcccaatggcggagaatctgtgatgaaagaagctgcgcagatcgcgcaggcagaggaatttattgaggaaaaaccggagaagtaccacagtcatatcgcacagggtggttcgaatgtatcaggaggacagaaacagcggttatccattgcaagggcaatcgcgaaacatcccgaagtctttatttttgacgacagtttttcggcattggattataaaacggatgttgctcttagaaaagcattgaagaaaaagaccgcacagagcacagtcctgatcgtagcacagcgtatcagcacaattcttcatgcagaacagatcattgtactggatgaaggaaggattgcgggaattggaacgcacagagaattgttggaaaattgtgaagtatatcgtcagatcgcggcttcacagctttcagaagaagagttgaatttgaagggaaaggaggtagaagccaatgcctagacacggacatatgggaccgggaggtaccagcgaaaaagcaaaagattttaagggaacactgaaaaaacttcttcattatatgagtgtctttaagatacagatggcttttattgttgtttttgcaatttgcggaaccgtttttaatattgtcggaccaaagattttaggaaaagcaacaacagaaatctttcatggtctggtcagtaaagtatccggtggaagcggaatgaattttgaaaagattggtcagattcttttgatgacacttggattgtatttgatcagtgcattgtgttcttttatccagggctatttgatgacgggagtttcacaaaaaacaacctatcgtttgagaaaagaaatttctgaaaaaatcaaccgcatgccaatggattattttgatacaaaaccagtcggagaagtgttgtccagagtgaccaatgatgtggatactctggggcagagcctgaatcagagtgcaacacagatgatcacatccgtgaccacactcatcggtgtgttgatcatgatgctttccatcagtccgctgatgacactggcaaccttggttattcttccaatttcgatgatcttgatttccgttgtgatgaaacattcgcagaaatatttccggggtcagcaggaatatttgggaaatgtgaatggtcaggtagaagagatatacagcgggcataatattatcaaagggtttaataaagaagaagatgtcattcgggaatttgatgcaaccaatcataaactgtatgattctgcatggaaatcgcagttcttttccggaatgatgatgccgatcatgcagtttatcggaaatcttgggtatgttgttgttgcgattctgggcggatttctgacgatcaagaagacgattgaagtgggtgatattcagtcttttattcaatatgtgagaaactttacccagccgatccagcagattgcccaggttgccaatatgcttcagatgacggcagcggcttcggagcgagtctttgaatttctggaggaaacagaggaagatcagacggtggagaatccggtagctgtagaacatctggaaggaaatgtaagttttgagcatgttcattttggatacaatgcagacaagatcatcatcaatgatttttcagcagaagtaaaagaaggacagaagattgcaatcgtaggaccgaccggggccggaaaaacaacgatgatcaagctgttgatgcgcttctatgatgtgaacagcggtgcgatcaggattgacggacataatgtcaaagattttaacagaagtgaattacgtgagatgttcggaatggtattgcaggatacatggctgtttaacggaagcattcgtgataatatcaaatatggaaaactggatgcaacggatgaggaagtgatccaggcagccaaggcagcacatgtgcatcagtttgtgaagacacttccgggcggatacgatatggagctcaatgaagaggcaaacaatgtgtcgcagggacagaaacagctgctgacgatcgcaagagcgattctggcagatccgaagattttgattctggatgaagcaacaagttctgtagatacgagaacagaggtgttgatccagaaagccatggacaatttgatgaagggacggaccagttttgtaattgcacatcgtttgtcaacgatccgagatgcggatctgatccttgtaatgaaggatggcgatatcgtagaacagggaaatcatgaagaacttctcaaaaaaggcggattttatgcagacttgtataattctcaatttgaaaaaacgacagaggctgcttagagatcagataaaaccggtgggacagagtcctgccggttttgtgtttcgctaagaaatatgttatactaaaaaatatgacaaaaaagggggaaaaagggtatgccattgacacattttgatgcggaaggaaaggcccgcatggtagacgtgaccgagaaaaaaaagacagtaagagaggcgacagcgaccgggaagatcaaagtcagcagggaagtatatgatgcaattgaagcaggaacggtcggaaagggggatgtgctttctgtggcgactacagccgggatcatgggagtgaagcgaacggctgatctgattccgatgtgtcatatcctgccgattacaaactgcaggatccgatttgaaaaggatgcgcagaacctggagattatatgtttttgtacagtgaaagtgaccggaaagacaggagtagagatggaagcactcactggagtcagtgtggcgcttctgacaatttatgatatgtgcaaggcgctggataaattcatggagattcaggaaatttatctctgccaaaagaccggtggaaagagtggggagatcgtgaacccgcgaataaaaagtgagggagaagaaacatgatgaaggcagcagttgtgacattgagtgataaaggttttcgaaaagagcgggaagacaaaagcggagaattggtgcagctgatgttaaaggaagcagggtatgaagtagcagagtatgtgctgcttccggatgaacaagaacagatcgaggcgatgttaaagcggttgagtgatgagctggagatggatctgatccttacgacagggggaaccggattttcgcagagagattgtacaccggaggctaccatgaatgtggctaccagaaatgcgcccgggattgcagaagcaatgcggtatgcttccctggcgattaccccgagagcgatgcttagccgtggagtgtcggtgatccggaatcagacactgatcatcaaccttccgggaagtcccaaagcggtgaaagaaaatctggaatatattttgcctacattggcacatggattggaaatcttaaaaggagcagcaggagaatgcgggatcagtttgaacgaaacataaactatatgcgggtctcagtgacggatctgtgtaatctgcgttgtgcatattgcatgccgaagtccggcgtgcatcagatctctcacgatgagattttgacctttgatgagatcgtaagagtatgccggatcggagcagagcttggaatttccaggattaagctgaccggcggggagccgttggtacgaaaaggagttgaaaaactggcagagatgctctgccagacgccggggattgagcaggtgacattgaccaccaacggagtcttcctgaaggagaagcttccggtgcttcagcaggcgggggttcactcggtcaatatcagtctggatacactggacagggagcaatatcagaagctgacaggaacggattgtctgttacaggtaatggaaagtatttatgcggcattggagcagggaatgcaagtcaagataaactgtgtggctttgaaagatcaaaatgaatctcagtggagtaagattgcagctcttgcaaaatcgtatcctctggatgtgcgttttattgagatgatgccgatcggtcttggaaaatcctgtccgggaagtttacaggaaacggtgcagaagcaactggaagctgtatatggagaagcaaagccagaggcagatctgaatgcagagaggggaaatggaccggcagtatactgggagttcccgggattccagggaaagattggatttatcagcgcaatctcccataagttttgcgcagactgcaatcggatccggatgacggcagaaggttttgtaaaaccatgtctgcagtttgcaaaaggggtagatatgcgtgctcttttaagagggcagaatgaagatattgtattaaaagaggcgctgaaacagctgatttatgaaaagccgcgatgccatcagtttgaaacagaagacgaggatgaaagtctggaacagcgggagatgtcaagaattggaggatagtttgaaatgggaattgtaaaagcagtgtgtacgagccctgcaaaaggaacacagaagacaaatgtaaaaagtgcggaatttatagaagattttgggattcaaggggatgcacatgctggaaagtggcatcgtcaggtcagtctcctttccaatgaaaagatagaggcttttcgggcaagaggagcagaggtgttggacggtgcctttggagaaaatctggtggtagaagggtttgattttaaaaatcttccggtgggaaccaggtttcagtgcaatgaggtgattcttgagatgacgcagatcggaaaagagtgtcatcacggatgtgagatctttcagaagatgggggactgcatcatgccgagagagggagtgtttgcaagggtcattcacggcggccggatttcctgtggggatgagatgcacattttagatactgtgtaaaagaagattttcttgcacaaagaaaagaatcgtaatatagtgtaaaaagcaaagtgaaaacggaggaagaagtatgaagtggaataaatttcgtctggcgacaacaacagaggcagaagacattgtcagcagtatgttgatggatttgggaatccagggtgtggagattgaagataaagtgccgctgacacaggcagataaagagcagatgtttgtagatatcctgccagagacagaagcagatgatggtgtggcatatttaagtttttatctggaagaggatgaagacaaagaaaaggtgcttgcgaatgtaagagctgaattaaaggatatggcctcctatctgaatgtaggagcatgtacgatcgaggagtctcagacggaagatgtagactgggtaaataactggaaacagtattttcatcagttctatgtagatgatattctgatcattccgtcctgggaggaagtgaagccggaagacagtgataagatggtgatccatatcgatccgggaacagcgtttggaaccggaatgcacgagacaacacagctttgtatccgtcagatccgcaaatatacaactccggataccaccattttggatgtgggatgcggaagtggaattctgggaatgctggctttgaaatttggcgcaaaatattccgttggaacagatctggacccatgtgcgatcgaggcaacctatgagaatatggaagtcaatggcatcggcaaagacaagtatgaagtgatgattggaaatatcattgatgacaaagaagtgcaggataaagtcggctatggaaaatacgatattgtggctgccaatattctggcagatgttttggtcgaactgacaccggtgatcgtgaatcagctcaaagatggaggcatctatatcaccagcggaatcattgatgataaagaagaaacagtagtagaggcagtgaaagcagcgggactggaagttctggaagtgacctgtcagggtgagtgggtctctgtaactgcaagaaagaacggataaggaaggatctggatctatgcagaatttttttgtatatgactcgcaggtacagggcgaaaaaatatatatagaaggcacggatgtgaatcacatcgtacatgttctgagaatgaaggtcggagaagaagtcagtgtgcatgatgatgtgaaccggaaatatttgtgccgcattcagaaactggaggaagaacaagttgtgctttcgattgtaaagcagcaggaatcagatacagaacttgcatgcccgatctatctgttccaggggcttccaaagggagataagatggaatggatcatacagaagtgtgtagaacttggagtacatgcgattgtaccggttgcaacaaaacgtgcagttgtaaagctggatgagaagaaagcgcaaaaaaaggtgagccggtggaatgcaatcgcagagagtgcggcgaaacagtccggaagagggattgtcccggaagtgcttcctgtcatgaaatggaaggaggcgctggaatatgcacgtcagctggatgttacgatgatcccttatgagaaagcggaagggatgaaagcaaccaagcagctgattggttcgatttcttccggacagtcggttgggatttttatcggtccggaagggggatttgaagagtctgaggtggaggctgcaaaagcgatgggggcagttcctgtgactctgggaagaagaatcttacggacagagacagctggcatgacgatcctgtcaattctgatgtatcatctggaaagagagtaacatagtgtaataatgagaagaagtgaaaaggaaggtatcatggaagtatatttggataattcggcaacaaccagatgttacacagaggtgggagaactggtatataaagtcatgtgtcaagattatggaaatccgtcctcgatgcatcgcaaaggggtggatgcagaacattatatcaaagatgcaaaagaaattctggcaaagattttgaaagtcaatgcaaaagagatttatttcacatccggtggtacagaaagtgataatctggcaatcatcggaaccgcgagagcaaacaaaagaaggggtaatcatctgatcacgtcatccatcgagcatccggctattttgaatacgatgcgctatctggaggaggaagagggattccgtgtgacgtatcttccggtagacagtagggggcgaatcaagctggatgccctgaaaaatgcattgtgtgaggagactattctggtttcgatcatgtatgtcaacaacgaagtcggggctgtacagccgattgatgaggcagttgaaattgtgaaagggtttaatccgaacattttgttccattcagatgcagtgcagggatttggaaagtacaagatttatccgaagcgtcagaagatcgatctgttgacagggagtgggcataagatccacggaccgaagggaacgggatttttatatgtcaacgaaaaagtcaagatcaaaccgatcgtatttggcggagagcagcagaaaaatgtccgttccggtacggaaaatgttccggggatcgcagggcttggattggcggcgaaaatgatctatcaggatctggatatgaagacggcattgatgcgggagctcaaagagtattttatcgaaggaatttcgaaaattgaaaatacaacggttcacggacttaccgatgaaaacagtgcaccacatatcatcagcgtgggatttgcggggatccgaagcgaagtgcttctgcatactttagaggacaaaggcatctatgtatcttcgggttcagcatgtgcttccaatcatccggcgatcagcggagtgttaaagggaatcggtgcgggaaaagagtatctggacgctacgatccggttcagcatgtctgaatttaccacaagagaagaaattgactatacattggaaacactatataattgtgtaccgatgctgagaaaatatacaagacattgatatttgagaaaatccaaaagaaaaggataaataaaggagaaaagcatgagatttcattcatttttgattaaatacggggaaatcgggatcaaggggaagaaccggtatctgtttgaggacgcacttgtgcgtcagatccgttttgcattaaaagatgtagacggtgaatttaatgtacacaaggcacagggaagagtgtatgtggactgcgaaggagagtacgattacgaagagactgtggatagtttaaaaaaggtattcggtatcgttggaatctgtccggttgtgcgtcttcaggacaatggatttgaacagctgaaaaaggatgtggaaaaatacatcggtgaagtgtatccgcagaagaatcagacgtttaagattgaggcgagaagaagcagaaaatcttatccactgaattcgatggagcttaactgtgaactaggtggtgtgattctggatgcgtatccacagatgaaagtggacgtacacaatccgcagattcgcctgaatgtggaagtgcgcgaagagatttatttatattcagagatcattccgggaccgggcggaatgccggtagggacaaacggaagtgccatgcttcttctttccggaggaattgacagcccggttgccggatatatgatcgcaaaacgtggtgttgctctggaagcaacgtatttccatgcacctccgtacaccagtgaacgtgcgaaagaaaaagtggtagatctggcaaggctggtttcaaaatattccggtccgatcaaactcaatgtagtcaattttacagatattcagctgtatatttatgagaaatgtccgcacgatgaactgacaatcattatgcgcagatatatgatgaagatcgcagaacattttgcaaagcaggacggatgtctgggactcatcacaggagaaagtatcggacaggttgcaagtcagacgatgcagagtctgctggcgaccaatgcggcatgtacacttccggtttatcgtccgttgattggatttgataagaaagagattgtcgatatttctgaaaagatcgatacgtatgagacctccatccagccatatgaagactgctgtacgatttttgttgccaagcatccagtgacaaaaccaaatctggagcgtattgaaaaatccgagagaaatctggatgagaagatcgatgagctgatgcagactgcgatcgatacagtagagacgatcatgataaaataagagaataaaaaggctgcctcgtaaagagacagcctaaaaataaatgactgaattatttaataatgtaagaatccagtgcagccaagatatcatccagattagaatcagcgtggatgttcagatcgatcggttttgaaagatccagactgaaaattcccataattgatttggcatctatcacatatcttccggacactaaatcaaaatcattatcatattttgtaatttcgtttacaaaagattttactttgtcgattgagtttaaagaaatctgtactgttttcattataaaagtccctccttgatatacaatgcttcgagtatttttactctagatatattctacgagaagtatttgtaaaagtcaagaaacaaacaggaaaaacaaggaaaaccaggagaatattttatgaaaaaagtagcattacacaatctgggatgtaaagtaaatgcatatgaaacagaagcgatgcaggagatgctggaacatgccggatatgaaattgttccgtttcgggaaggagcggatatttatgtgatcaatacatgtacagtcaccaatattgcggatagaaaatccagacagatgctgcatcgtgcaagaaagatgaatccagatgcagtggttgtggcggcaggctgctatgtgcaggcgcaggcagaaaaacaggtgatcgatccatgtattgacattgtacttggaaacaataaaaagcaggatcttctgacagcattgcaggcatatgaagaggcacacagcgggctgcgggaagtgattgatatcaatcatacaaaggagtatgaaaatctgcatctgacgaagcagagtgagcatacgagagcctacattaaggtacaggatggatgcaatcagttctgttcgtattgtattattccgtatgcaaggggaagagtcagaagccgcgcaaaagaagaagttgtaacagaaatcacagaattggcaaagaatgggtatcaggaagtggtgctgacaggaattcatttgagttcctatgggattgattttgagaatgaggacaatcttttgagtctgatccgtgcagtgcatgagatcgaaggcattcaaaggatccgtctgggatctctggaaccaaggattattacagaagaatttgtacagtctatttcccggctcccgaagatgtgcccacattttcatctgtctttgcaaagtggatgtgatgagacattaaagcggatgaaccgcaggtatacaagtgaagaattttatgaaaaatgtgaaattttaagaaaatattttgaaaacccggcattgactacagatgtgatcgtaggatttcctcaggagagtgaagaggagtttgagacaacatatgaatttttaaagaaaatccaattctatgagacacatatttttaaatattccaagagagaaggaacaaaggctgccgtgatgcagggacagattccggagcaggtaaaggcagaaagaagtgcaagactgattgagctgggagagaaaaaccgcagagcatatgaggagtcttttgcgggaaaaacagtagaagtgcttgtggaggaaaaatccagtgtgaacggaaaagagatgtggacagggcatacaaaagagtatatgaaaattgcactagagtctgaggaaaatcttcagaattgtattctaaacgtgaaaattaaagatggccgggaaattattcattgaattttaaaatagattatattagaatgataagtaggatactaacgcaattatgctgatttgagagaatcagatctgcgcgtaaataaaagaaaaaatggaggagatacgatgagcgatttgagtaatacacagttctttcaggtagaaccgggaccacagatttctgcaaaagatattctggagattgtatataaggcactgaaagaaaaaggctataacccggtcaaccagatcgtgggatacattatgtcaggagatcctacttacattaccagctacaatggagcaagaagcctgatcatgaaagtagaaagggatgaattggtcgaagaactgttaaaagcgtatatcgagcataattcatgggaataatcgatgatgcggatcatgggactggattatggcacgaagacagtaggtgttgcgatcagtgacgcactcggtctgactgcgcagggaatagagaccattcagagaaaagaggaaaacaagctgcgccgtacgctcgcccggatagaagagctggtaagggaatatgaagtggatacgatcgtgcttggttttccaaagcatatgaataacgatgtaggtgaacgtgcggaaaagtctttggaattcaaagagatgctggtgcgaagaacagggcttccggtgatcatgtgggacgagcgtctgacgacagtggaggctgaacgtacattgattgaaagtcaggtgcggcgtgaaaataggaagcagtatattgataaaattgcagctgtttttatcctgcagggatatttggattcgttatatttgaagaagaaggccgaagaggaaaactagaggtgtccacaggaggaagaacgcatggaaaagattaaattttgttttgacgagtcgggagacagtgtcgaattttttgtgttggagcagacgaagatcaacggggcatcttatatccttgtgacagattcacaggaagatgatgcagaatgtttgattttaaaagaaggagaatctcaggatgcaaaggagagcgtctatgagattgtagaggacgacgtagaattacaggcagtttcgaaagtatttgaagaattgctggaagatatagagattgaaatgtaacttagaatattactttaccgcaggggacgtggcatatgacagtagaacgggaaaaagtgcaggaaatgctgaaggagaagctcagagaaaaaggctggaaggtaaccaggcagagactttccattttgcagactctggcagaacataaggggcagcatctggcggcagaagacatttttgagataatgaaagcagactatccggaaatgggacttgcaaccgtgtatcggacgctgcagcttttgtatgaaattcagttgatcgaccggatccatttcaatgatggatgtatccggtatgagatcggtcatatatttgacggagactccaggcacagtcatcatcatctgatctgcagaacatgtggacgtgtgatgccgtttgaagatgattttttggaggatctggaggcacagatcgaagccgatacagggtttcatgtattggatcatgaattgaaattttatggacagtgcaaagaatgtgcagaagcttccatgcggaaaaagaatacataaaaacacatggaggtgtatatttttgaaaagagaaaatcgtggaaaactaaaaatcattcctttgggaggtcttgaacagatcggtatgaatataactgcattcgaatatgaagacagtattattgtagtagactgtggacttgcattcccggaggatgacatgcttgggattgatctggtcattccggatgtgacctatctgaaggataatatatccaaagtaaagggatttgtgatcacccatggtcatgaagaccatattggagctttgccatatgtattgaaagagctcaatctcccaatctatacgacaaagctgacaatgggaattatcgagaacaaattaaaggagcataatctgcttcgtacgacaaagagaaaagtggtgcgccacggacagtccatcaatctggggcagttccgaatcgaatttatcaagacgaaccatagtattcaggatgcgtctgcactggcaatctattcaccggcaggaacggtcgtgcatacaggagacttcaaggtggattatacaccggtatttggagatgcaattgatcttcagcgctttgcggaaatcggaaaaaaaggtgttctggcgctgatgtcagacagcacgaatgcggaaagaaaaggatttacccagtcagaacgtaccgttggaattacgtttgaccatatttttgcagagcatcagaatacaagaatcatcattgcaacgtttgcatcgaatgtagaccgtgtgcagcagatcatcaattctgcatataaatatggaagaaaagtagtggtagaaggccgcagtatggtcaatatcatttcaacggcatcggaacttggatatctgaatgtgccggagaataccctgatcgagatcgaccagttaaagaattatccgccggagaagacagttttgatcacaacgggaagtcagggagaatctatggctgcgctttccagaatggcgggggatgtgcaccgtaaagtaacgatccagccaaatgatactattattttcagttccaatccgattccgggaaatgaaaaggcggtgtctcgtgtgatcaatgagctttcatccaaaggtgcaaacgtcattttccaggatgctcatgtttccggacatgcctgtcaggaggaattaaaactgatctactctctggtaaaaccaaaatatgcgattccggtgcatggtgaatatcgtcacttgaaagcaaatgcggagattgcacagtctcttggcattccgaaggagaatatttttatcattcagagtggtgatgtgattgaagtaagtgatacagaagcaaagatagtagataaagttcatacaggagcaatccttgtagatggtcttggtgtgggtgatgttggaaatatcgtgctgcgtgacagacagcatctggcagaagatggaatcctgatcgtggtactgacactggaaaaaggcagcaaccgtttgctggcaggaccggatatcgtatccagaggatttgtttatgtaagagaatccgaaggtctgatggaagaagccagaaaagttgtgacagacagtctggataaatgtctgtcaggaagacatgcggactggaataagatcaagatgaccatccgtgatacaatgaacgattttatctggaaaaagacaaagagaagaccaatggtcattccgattattatggatgtgtaagatatgatagtagatgaacgtatcgtgacattcatcaattctttagaaacagagaacagtgaaatactcgaagcagtggaacaggaggctctgagcacatatgtgccgatcatccgaaaggaaatgcagagttttctgaaagtgcttctgatgatacaaaaacctatgtgcatcctggaagtagggaccgcagtaggtttctctgcgttattgatgagtgaagcggcaccaaaagggtgcaggattacaacaattgaaaattatgaaaagagaattccgatcgccagggagaatttcagacgagcaggaaaagaagagcaaattacgctgatcgaaggcgatgcgatggatgtcctgaaaacactggagggcagctttgattttatttttatggatgccgccaaaggtcagtatatccggtatatgccggaggtgctgcgtctgcttcggccgggaggaactcttgtgacagacaatgtactgcaagatggggatatcgttgaatcccggtttgcagtgggacggagaaaccgtacgatccattccaggatgcgggagtatctgtacgaattgaaacatcatgaactgctgacaacgtcgatcattccgcttggagatggagtggcggtcagcgtgaaaaaacaggaaggagaataaaatggcaagacaccctgaacttttgattccggcaagcagtctggaagtgttgaagacagcggtcatttttggggcagatgcggtctatatcggcggagaagcattcggactccgtgcaaaagcaaagaatttttccatggaggacatgaaagaagggattgcatttgcgcatgcccatgacgtgaaagtatatgtaaccgccaatattctggctcacaatgatgatctgccgggagtccgcaaatattttgaggagcttagagagatcaagccggatgctctgattattgcagatccgggagtgtttgagattgcaaaggaagtgtgcccggagattgagaggcacatcagtacacaggcaaacaatacaaattacggaacatataatttctggtacaaacagggggcaagccgtgtggtttctgcacgtgagctttctctggaagaaatcaaagagctgcgtgccaatattccggaagatctggaaatcgagacatttgtacatggggcaatgtgtatttcttattccggaagatgtcttttgagcaattattttacaggacgggatgcgaacagaggagcatgtacgcacccatgccgctggaaatatgcagtagtggaagaaaaaagacctggcgaatatctgccggtttatgagaacgaaagaggaacctacatcttcaattccaaagatctctgtatgatccagtatatcccggaaatcctggaagcgggaatcgacagtctgaagattgaagggcgtatgaagactgcactttatgtggctacggttgccagaacttacagaaaggcaattgacgattatcaaaaggatccaaagctgtatgaaaagaatatgccgtggtatctggagcagatttccaactgtacgtaccgtcagtttacaaccggatttttctttggaaaaccagatgaaacgacacagatttatgacagcaacacctatgtgaaagaatacacatatcttggaattatcggagaagtgaaagagggcctgtgccggatcgaacagcgcaataaattttctgtcggagagaccattgagatcatgaagccaaacggagaaaatgtggaagcgaaggtagaacgcattctcaatgaggatggggaggagcaggagagcgctcctcactcaaagcaggtgttatatgtggcgctggatcaaaaggcggacaagtatgacattttacgaagagcagaaaaagaagcgtaatttttctaccgcacttttttcaatgcgcgatacataagagcgggagatgcccagttgtttggcaacttcccgctgcgtgtattcttcgccgccataaagtccatatcgcatttttaaaacgagtttttcccgttgggagagctcgttttctactttttcatatagtttttggatgttctcttttaaatacacccgttctgggatatcttcttcatctgtttcgataatatcgtacaatttgatttcgtttccttcccggtcagtaccaattggttcatataaggaaatttctttggatgttttttttcgtgcacgcagatgcatgagaatttcgttttctacacatttggaagcataagcggccagtcggtttcctttggttgggtcaaaggtgacgatggctttgatcagaccgatggttccgatcgagatcagatcctctggatcttcgtccacgtactggtattttttgatcacatgtgcaacgagccgcagattccgttcgatcagaatatgtttcgcctgcaggtcaccctcagtatatttttgaatatattctttttcttcggaaggagtgaggggatttggaaatgatttcaagacagcacctcaaagcacatttgataacagtgtatgtaaagatgcggggatttgtgcttttccaactcaaaagaggacagggaaaaaagtagttgacaaacagcaggaaaaaggaatatagtaggaataccttcccaaagcaatctgctttggagaacataacatctattgattcacaagaccatatcggtcaaaattttcagaatgaaaagtgattggagaaaatcagcaatgtggggctgaatgtacagactcttggaaaaggagtgtgcgatgagtttttgctcagtgttatctgcagcagtgatagggctgcgggtagaatttattcatgtggaagcggatatcagcaatgggcttccggtatttcatatggtgggatatctttcatcagaagtaaaggaggcgggagaacgggtgcgtacggcgatacgaaacagtggaatttcatttccggcaaagcggacaatcgtcaacctttctccggcaaatgttagaaaaagaggagcgtcttttgatcttccgatcgcagtggcagtgatgactgcactggggtgtcagatctccggggaaatgcgtcatacactgttcatcggagagcttggactggatggaagtgtactggaggttcagggggtactcccgatcgttctggcggcaaaaaaggcaggtgtaaaacggtgcgttgtgccaagctccaatgagccggaaggcacgcttgttgaaggaattgaggtagttgggatcagacatttgcggcagcttacaacaatcctttcaaaggagcgaaaaaacgaaggaaaaagaatgcgtggaaagaagtcggtgaaacagcgtgtccccgatttttgtgaaatgcaggggcaggcagcggtcaaacgggcagcggaaatcgcagtggcaggaggacataatctgcttttaatcgggccgccgggcagtggaaagacgatggcggcagagcggattgcaggaatccttccgcctctgacacgggaggaaagcatggagatcacacaaatatacagtatcatgggaatgcttgatgaagaagagcctttgattcagagcaggccatttcgaagtgtgcatcatacagctacaagagcagctctggccggcggtggaatgattccgatgccaggtgagatttcgctggcacatggtggtgtcttgtttctggatgagctgccagagttttcaaaaagcgtactggaagtacttcggcagcctttggaagagcatcagatgcggattgcgcgaacccatgggaattatgtgtttccttccgattttattttgatcgcagcgatgaatccatgcccttgtggatgctatccggatatgcagaaatgcacttgtacaccagtacagatccagaactatttgggcaggatcagtcagccgtttctggatcggatcgatctttgtgtggaagccccccgggtggagtatgattctctgattgggacgagaccagaggaaacatctgaaacaatccgggacagagtatgcagagtcagagaccagcagcgagttcggtatggcacaacgctggtgaacgggaggctggacaatgcggatgtcgagagattttgctgtctgggagagcaggaacaggcagtaatgaaacaggcattttccacatttggatttacagcccgtacctatcataaagtgttaaaggtcgcaagaacaattgcggatatggatggaagtgaaaaaattcaaaaacagcatttgtgcgaggcaatcgggtatcggacaccggataagaaatactggaaacgatagggggaagcagggatgaagtatgaatgctggttatccgaaatccgtatgatcccggatcggacaaaaataaaattaaaagaagaactcggaaccgcaaaggatgtttattatatagaagaaacagtattgaaaaatatggagtttctcaaagagaaggaacgaaaaattcttctgcaggcaaaacgggcagaagatctggagaaacgctatatggcaatgatggaaaaagagattcacctgattccgtggggagaaaaagaatatccgtctcgtctgaaagtgatttatgatcctccgtatgcgctatatgtaaagggaacactgccctcggatatgcagcattcggcagctattgtaggggcaagaaactgtacgccctatggagaaaaatatgcgttggaatatggaaaaaaactggcagaatgtgggatccaggtgatcagcgggttggcacggggagtagatggaaccggccagaggggtgccttgatgggaggaggaaatacttttgcagtattagggagcggagtggatatctgttaccccaaaaatcatatgggactgtatttggatattctcaagcatggcggaggaatcctttcggaacttccacccggtacacctccgctgccacaacattttcccagaagaaacaggatcatcagtgccctgtcggacgttgtgctggtcattgaagcgaaagaacgcagcggttctttgatcacagcagatctggcactggaacagggaaaggatgtctatgcgctgccggggccggtgaacagcagtttgagccaggggtgtaaccgactgatttatcagggagcaggaattcttttgagtccggaaaatctgttggaggagatgggagtgatatgtagtatcccatgtgaaaaatcggacaaaaatgaaaaagtgcttgaaagtcctgaatatatggtgtatagttgtgtcggtctgtatccaaagagtgtggggcagctgacagaagaaacaaagctgcgtccggaggaagtgttaaagcttttggtatctttggaattacaggggtatatcagagaaatctcaaaaaattattatataaaagtgaaatgacggcgtgagggcgccggatggaggaaatatttcaatggcacattatctggtaattgtggagtcaccggcaaaagtgaagacgatcaaaaaatttcttggaaagaactatacagtagcggcatcaaatgggcatgtcagagatttgccgaaaagtcagcttggaattgatgtagaacatgattttgagccaaaatatattaccattcgaggaaaaggggagatcctcgcaaatctgagaaaagaagcgaagaaagcagataaagtgtatctggcaactgaccctgaccgagaaggagaggctatttcatggcatctggcaacagctctgaaactggatgagaaaaagatgcggcgtatcacattcaatgaaattacaaaaaatgcggtcaaagcctctttaaaagcgccaagagacatcgatatggatcttgtagatgcacagcaggcaagacgtgttctggatcgaatggtaggataccggatcagtccgcttttatgggcaaaagtgaaacggggactgagtgccggacgtgtgcagtctgtggcgcttcgcattattgcagacagggaagatgagatcaatgcatttattccggaagaatactggagtctggatgcaatattgaaagtcaaaggggaaaaaagacctctgactgcaaaattttacggaaccgagaaacataagatgaccattcattcgaaagaagaactggatgagatcctgcaggcactggaaaaagaaaaatatgaagtgcttgatatcaaaaagggagagcggatccgaagagcaccgcttccgtttacaaccagtacgctgcagcaggaggcagcaaaagtactgaatttcggaacacagaagacgatgcggattgcacagcagctgtatgaaggaattgatgtaaagggaaacggaaccattggtgtgatcacatatttgcgtacagattctacccgtatttcggaagaagcagacgcagcggcaagaacatatatcacagaaacatatggatcggaatatgcagcggcaggagaggcgaataaaaagacagagaagaaaatccaggatgcacatgaagcaatccggccgactgatatttccatgacaccggcttctttgaaagactccctctccagagatcagttccgcttgtatcagttgatctggaagcgttttgcagcaagtcgtatgcagcctgcaaaatatgagaccacatctgttaagattggtgccggggaataccgttttacagtggcaacttcaaaagtggcgtttgagggattccgtacggtttatacagaagcagacgaagaaaaagaagtgagcaatgttcttgtcaatggactgagcatggactcagaactgacaaaagaagagtttgataccaaacagcatttcacacagccgccggcacattacacggaagcaacactcgtaaaagctcttgaggaactggggatcgggcggccaagcacatatgcgccgaccatttccacaatcctcggaagacgctatattacaaaggaagccaagaatctgtatattacagaaatcggtgaagtagtaaatcatattatgaagcagtcattcccgagcattgtagatgtgaactttactgccaatatggaaggacttctggatatggtagaagaaggaaaagtgcagtggaaggtcgttgtaagcaatttctatccggatctggatgaagccgtaaaaactgcggaaaaagagctggaaagcgtgaaaattgaggatgaagtgacagatgttatctgcgaagagtgtggaaggaatatggtgatcaagtatggtccccacggaaaattcctggcatgtcccggattcccggactgccgcaataccaaaccatatctggagaagatcggagtggaatgtccggtttgtggaaaagaggttgtaatccgcaaaaccaagaagggcagaaagtattatggatgcgaaaacaatccggaatgtgagtttatgtcatggcagaaaccatccaaagaaaaatgtccggaatgtggtggatatatggtggaaaaagggaataaactggtctgtgcagacgaacagtgtggatatgttcggaacttaaaagaaaattagaaagatttcagatgaaaagacgaggaaattgcaacaatttcattgaaaaaataaaaattgtatgataatatgatggtgtctattgaataggaacgagttgtatatacaattgagactggagggaacggatgagcgtacagttattagataagacaagaaaaataaacaaattattgcacaataataattccagtaaagtagtgtttaatgatatttgtgctgtcctcacagaaattttaaattccaatgttctggtagtcagtaaaaaagggaaaattttgggagtcagcaaaagtgttcatgtagatgcgatcaatgagctgatcgtggagtctgtaggagctcatattgatgatatgctcaatgagcgcttgctgaatgtattgtcgaccaaagaaaacgtcaatttggagacgcttggtttttcaccggaaaaagtgcagggatatcaggcgatcattgtaccgattgatattgcaggagagcgtctgggaacactttttatttataaacagaatgaatggtattcgattgatgatattatcttaagtgagtacggaacagcggtggttggtctggaaatgcttcgttctgtaaatgaagaaagtgcagaagagacgagaaaggaacatatcgtacagtcagcgatcagtacactttcattttcagagctggaggcgattatccacatttttgaggagctggacggtacggaaggtattcttgtggcaagtaagattgcagatcgtgttggcattacaagatctgttatcgtcaatgcacttcgaaaatttgagagcgccggagtgatcgaatcgcgttcttccggaatgaaaggaacatacatcaaagtgttgaatgactatgtctttacggaattggaaaagattaaaaaagaacgtttgtaaaaatgtacagaagataaaagggtatcagcaagctgatgccctttctctgattatagataagagtgcaggaggaaagaaatatgtatgaaggaaatgcagtagatcttcagatggaaaaagtaatcgcggcggatgcgatcctggatgatgaaacgcatcattgtcaggtgtttcggtatgatatggaggaagactacatatatttacaattgaaggaggatgacttgactgcaatttctctggatgctaaatatcaatgttatctttctaccagaacagagcttttgttctgtaccggtgcagtgcaggaacggtatcagtgcgaacacggtaaaatgctggtatttcatattgaaaacgggttctatacgattcccgatgcaaaaggacctgtaaaaagaaaataaactaaatataaaatttcagaatctctgttgacaaatagaaaacagagtgctattttatattcatgaggtttagcactcgatatcaatgagtgctaataacgtataaaataaggaggagttaccatgaagttagtaccattaggcgataaaatcgtattgaagcaattagaagcagaagagacaacaaagtcaggaattgttttgcctggtcaggcgaaagaaaaaccacaggaagcagaggtaattgcagtcggacctggtggaatggtagacggaaaagaagtgacaatgcaggtagcagtaggagataaggttatttactctaaatatgcaggtacagatgtggaactggatggagaagagtatattatcgtaaaacagaatgatattcttgcaattgtaaaatagagtcgagagataattttttgaaacagttaacagacgaagtataacaggagtgtgaagaaacatggcaaaggaaattaaatatggagcagaagcaagagctgctcttgaaaaaggtgtaaaccagcttgcaaatacagtaagagtgacattgggaccaaaaggaagaaacgttgttctggacaaatcttttggaacaccgctgatcacaaatgacggtgtgacgattgcaaaagaaattgagctggaagatggatttgaaaatatgggagcacagctcattcgtgaagtagcagcaaaaaccaacgatgttgcaggagacggaaccacaacagcaactgttctggcacaggcaatggtcaatgaaggaatgaagaaccttgcagcaggagccaacccgattgttctgcgtaaaggaatgaaaaaagcaaccgatgcagcagtggcagcaatcgcagaaatgagccgtcaggtaaccggaaaagatcagatcgcaaaagtggcagcagtgtcttctggtgatgaggcagttggaaatatggttgcagatgcaatggaaaaagtttccaaagacggtgttattacaatcgaagaatctaagaccatgcagacagagctggatctggtagaaggtatgcagtttgaccgtggatatatttctgcatatatggcaactgatatggagaagatggaagctgttctggatgatccatacattctgatcacagataagaagatttccaatattcaggatcttcttccattactggaacagatcgtacagtccggagcaagacttctgatcatcgcagaagacatcgaaggagaagctcttacaaccctgatcgtcaacaaactgcgcggaacattcaatgttgttgcagtaaaagctccgggatatggagacagaagaaaagaaatgctcaatgatatcgcaattctgacaggtggtcaggtgatttccgatgagcttggaatggatttgaaagaagcaacaatgaatcagcttggacgtgcaaaatctgtaaaagtacagaaagaaaatacagtcattgttgatggatgcggagataaaaaagcaattgaagacagagtggctcagatcaagaaacagatcgaagagacaacatctgaatttgacagagaaaaattacaggaaagacttgcaaaacttgcaggcggagttgcagttatccgtgtaggagcagcaacagaaactgaaatgaaagaagcaaaactgcgtatggaagatgcactcaatgcaacaagagctgcagtagaggaaggtattattgcaggtggtggttctgcttacatccatgcatccaaagaagttgcaaaacttgcagagactttggaaggcgatgagaagacaggagcaaagattatcctgaaagctctggaagcaccattgttccacattgcaacgaatgcaggtctggaaggcgcagtgatcatcaacaaagtcagagagtcagaaccaggagtcggattcgatgcttacaaagaggcatatgtagatatggtgagcgaaggaattctggatcctgccaaggttacaagaagtgcactgcagaatgcaaacagtgttgcatctactctgctgacaacagaatctgttgtttctacaatcaaagaagagacaccggcaatgccggcagcacctggcggaatgggcatgatgtaatgagaataaaatctccggatatctggattgagacagatatccggggatctttttttatgttttcagggtttcgttactaatagacaaaagaagtgcagaaaattttggaaattacgtgaaaattatgaatggactttgttttataagtaatacttcataattaaggttaaaataaatcaagataaaaataaattgcaggtgggaataggcttgacaagtgcagtgaatttttgtaccataacagataatctatggacatacatattagagaaagagaggaaataaatcatgggaaaaataatcggagaaggtattacatttgacgatgtcctgttagtaccggcatattcacaggtcattccaaatcaggtggacttatccacatatctgacaaagacgattaaattgaacattccgatgatgagtgctggtatggatacagttaccgagcaccgcatggcaatcgctatggcacgtcagggaggaattggtatcatccataagaatatgacgatcgagcagcaggcagaagaggtagataaagtaaagagatcagagaatggtgttatcacagatccattttcactttctccggagcatacactggcagacgctaatgatctgatggcgaaattcaggatttcaggtgtaccgatcacagaagggaaaaaactggttggaattattacaaaccgtgatttgaagtttgaggaagatttctctaagaaaataaaagaatccatgacttcggaaggactgatcacagcaccggaagggattacactggaagatgcgaagaagattcttgcaaaggcgagaaaagaaaaacttccgatcgtggataaagacggaaacttaaaaggtctgatcaccatcaaggatattgaaaaacagatcaaatacccactgtccgcaaaagacagtcagggaagactgctctgtggtgctgcaattggaattacggcaaactgtcttgagcgtgtagaagcactggtcaatgcaaaagtcgatgtgatcgtaatggattccgcacatggacactctgagaatgttctgcgtacagtccgtatggtcaaagaaaaatatccggagcttccggtcattgcaggaaatgttgctacaggcgaggctacaagagcactgatcgaagcaggtgtagatgcagtgaaagtcggtattggacctggatctatctgtacgacccgtgtagttgcaggtatcggtgtacctcaggttacagctgttatggattgttatgcagtggcaaaagagtacggaattccggttattgcagatggtggtatcaaatattccggagatatgacaaaagcaatcgcagcaggagcgaatgtttgtatgatgggaagcatctttgcaggatgcgatgaaagtccgggaacatttgaattatatcagggaagaaaatacaaagtataccgtggtatgggatctattgcagctatggaaaacggaagcaaggatcgttatttccaggcagatgcgaaaaaactggttccggaaggagtcgaaggccgtgtagcgtataagggaacagtcgaagatactgtattccagcttatgggaggtctccgggcaggaatgggatactgtggaacagaaacgatcgaggcactcaaagagaacggatgctttgtgaagatttcagcagcatccttgaaagaaagtcatccacatgacattcatattacaaaagaagcgccaaactacagtgtagacgaataaagtaaaacgtgccgggacaggaaactgttccggctttttttaaatcaggagttcagatgaagaaaaaatccaacagaagaaaaagataccgttatgggaaaaaatatgagagaaaagtgttgtatgccaggataggacttgcagcgctgctgctgctgacgattgcgcttgcattgcggtcatgtatcgtaaaaaataaaggagaactgcgggcggatgtggatgcatccaaaccagagatcgatgtacagcttttagatgtcaatgagtattccagaccaggaattgaatccgatggaattactggagttgtgattcattatacggcaaatccaggatctacggcacaggagaacagagattattttcaggggttaaaagacagtcaggagacatcggtaagcagcaattttgtaatcggactggaaggggagatcatccagtgcgtgcccacatgggaagtggcctatgcatccaatgaacgaaataaagatacgatttccattgaatgctgtcatccggatgaaaccggaaagtttactgagaagacctatcagtcgatggtgcaattaacggcatggctctgcaggaaatacaatctgacacaagaagcagtgattcgtcattacgatgtgacggggaagaattgccccaaatattttgtagaaaacgaaaccgcatgggaatattttaaagaagacgtagcaaatgcactggcaaaaggaggggcggattgaatctgccgggaaagtataacgcttgcagtctcccaaaatgcttgctataataaacagaagatttgtgaagaaagatttgaggatgatatgatggatggattgatgatagaaacgttctgtaaatcgtgtgattataatattgtgctaattggctttatgggggcaggaaaatcaactgtggccagatttttgggagcgcagtttggcatggaaatcgtggaaatggatgaacagattgaaaagtctgaaaaaaagagcattccgcagatctttgagcaatatggagaagagtattttcgaaatctcgaaacgaatctgttgatcgaactgcagaattccaccaagaagattatttcctgcggcggaggcgcagctatgcgtgaacgtaatgtcagagagatgaaaaagaacggatatgttgttttgctgacagctgagccggagactattttggagcgtgtgaaggaaaatgatgatcgtccactgttaaaaggaaagaaaaatgtggaatatatccgggagctgatggagaaacgccgtgaaaaatatgaggcggcagcagatcttattgtgcatacagatgggaaagatgtacaggagatctgtgaagagatgattataaaattgatggagatggataagtagtgatgtttgaaaaattttttccggatgaatacctggcatccacctatatcattccttttgaggcattctatcagaagggataccggggagtgatctttgatatcgataatacactggtgccgcatggggcacctgcagatgaaagagcaaaaaaactgtttgcacgccttcaaaagatcgggttgtcctcctgtcttttgtcgaacaatcagaaaccgcgtgtggagatgtttaatcaggagatccagacaaattatatttacaatgcccataagccttcagttaagaattatgaaaaagcgatgagtataatggggacgacaaaagaaacgacattgtttgtcggggatcaattgtttacggatgtatggggagccaaaagaacaggaatttacagcattttagtgaagccgatccatccaaaagaggaaattcagatcgttttgaaacggtatttggagaaaatagtccttcatttttataaaaagaagcggaaactggataaaaaaggttgaaaaaagacagaatctattatagaattataaacagtcgagaaaaggcagcgcataaagtgcgcatttgaaggaggattacagatgatttcagcaggagattttaaaaatggtgttaccgttgagattgacggaaatatctatcagatcttggaattccagcacgtaaaacctggaaaaggtgcagcatttgttagaacaaaattaaaaaatatcatcagtggaggtgctgtagagaagacattcagaccaactgaaaaattcccgaaagcacacattgacagaaaagacatgcagtatctttacagagacggagatctgttcaactttatggatgtagagacctatgatcagattgctctgaatgaagatgttgtaggagattctctgaaatttgtaaaagagaatgaagttgtaaagatctgttcacacaatggaaatgtgttctcagtagagccaccattgtttgtagagcttgcaatcacagagacagagcctggatttaaaggcgatacagcacagggagctacaaaacctgcaacagtagagacaggagcaactgttatggtaccactgttcgtagagcagggagatgtgttgaagattgatacacgtacaggagaatatctctcacgtgtttaatagaaaagacgccgtagtgcgtctttttcttttgtttgcatttcatttatagaatttttatagagacttcatataaaatttgttgtatttgaaacaagactcctctataatcaagaaacataatattgttcatatcacatttcaaggcacgttcgtgccacatttttcaaaaagatgagcgcacaatcaggaaaggagaccgtatggaatataaagaatttgtgtgcgcagcaatggaaatcatgaatcaaaaagaagggaggaacggaatacaggtaaaagaacatactgcattgaaaaacaacggaaaactccgtcttgggctgctgattcaggaggagggaacgaacctgtttccggcaatttatctggaagaatattacgagaagtttcagaatggagaaacactggagcagatcgtgtcggaaattactctgctttatcaaacgatcaaggcaaagaacagaatagatgcagaacatttttgggatctggacaggtggaaaaagaagttggggatcaaggtgattcaaacagagaagaacagggagttgctgagggaaattccgcatttggacgtgctggatctgtcactgaccttttatatgattttagatcatcagcaagaaggaacggctacgatgcagattacaaacgagcatatgctacagtggaatctgaaaacagaagaactgtacgagattgcaatgcagagcgcgatcaggctgcttccggcagaattttgcacgctttcggatatgatccggaaaataacaggagtggaattggagacagtggatcaaaggcagaaggaatgtcagatgtatgttcttaccaattccagcaggattcagggagctgcctgtatgttttatccacatgtgctggatatgatcggagaaattttaaaggaagatttttatattctgccaagcagcattcatgaggtgatcatcctgccaaaatcgaaaggtatgaaaaaagaagagttggacataatgatacaggatatcaatggtacacaggtagaagcggaagaagtcctcagtgaccatgcctatctttatgagcgaagagcaggaaggattcaaatgactttttaaaagaaaggctctttacaatatcattaaattgtgctaggatatatagagtgtccggtagaatttcaggacacgagagattatgcgtctgtagctcagtggatagagcgatgccctccggaggcatgtgcggcggttcgactccgcccagacgtgtattttttatatcaaaataagagcagaatataaaaaggattgaacagcacctcattggaggtctgcttcaatccctttttttaaattaagtttacctttttctgcaaaatgcgatatgtaagtacatatcccagaatcgcaaggaccgttgtagtaatgcttccgatcaggagcatttgtatgaaatactctgaaaaatcaggctgtgcctgcgaaaaagaaacaatgtaatcaggcaggacactgctgatgactgaagctgcgaagctgataagctgagtgatcaggttcagaataaaatatacggcaatggcggtaatgactctatgcgcagggacaagctgtcccactgtgatacttgtataaataaacagaatgcaggcaaaaatcccaataaatgaaaagaatatgaccaagcagcaaaaggaagaaaaggacatacccagtgcattctgaaattcaggataaatcattttcaaagcagactgtacattttctcctgcgatcaaaagccaggcacagccaaagcagatcacaagatccagtatataccagatggaggccgaaaaaatctttgcccaaagttgtgtgaggggagatgccgggagtgtccaggtgatatacccctcatcggtgaataaattcttatagaagcgaactgcatacatgatgcagcaaccaaaggaaatcgtggaaaacagcatggtgagtatcacgatcaaaattgcgatcgcaggagcaaagtgctccggatctgctgaaaaatccaggtggtcgatcacaagaaaacggatcagcagacagctgatgatcaggactgcatgtaagactgcgaagatacgaactccgtattttaagtcatatttgatcagtttttttaacatcgaaacacctcccggaataaagcgtctacagattttctgtagtcgctgcgaatctcatctacagtagcattgagtgtgattgttccgtttttcagaaatagaacgcgatccagaacattttctacatctgtgatcaaatgtgtggagatcagaacagacgcattttcattgtaattggttaaaatggtccgcagtatatagtctcttgcggccggatccacgcctcctatgggttcatccaacacgtaaaattgtgcatctctgctcatgatcaggataagctgaactttttcttttgtccctttggacagtgatttcaggcgaagggacggatcgatatccagatcctttagcatcgtatgtgtgcgtgaaacatcgaaatctgtgtaaaagtcggcatagtaagagatcagttctgaaatcttacagcgttcatccagacagccgcgttctggaaggtaggaaacgatttgttttgtttccacaccgggttttaatccatttaccagaatctgtccgtcagttggtaaaagaagtccattgatcagtttgatcaaagttgtctttccgctgccgtttggtccgagcagtccgatgatctctccgcgttccagcgtcagatcaatattggagagggctggaaagtgatgaaattttttggttagtcctctgcattcgagtatgggattcataagtctacctccttgagtgctgtctgtatcaatgcggcaatttcttcgttttggaaaccgagctgtttcattttttcaagaaactgtgcgatatgttcggaagccagactggtctttacctcattgagcaggcgggcgtcttccgtaataaagcgcccgcttgtccgctgagaatataccagtccgcttcgttccagctcagagagtgctttttgcatcgtatttggattcacggcagcttctacggcgagatcccggacagaggggagtctgtcaccgggcttgtaaataccggatacgatatcctgctggatacgctccatcagctgaagataaatgggacggtcattgtctaattcccatggcatttgatcacctcgttttctatgaaaaatagactgtattatatatataatacaagcgtataatgaagttttcaatttgtcaagctacttttcatttgcggcaaggacttcatttggaagttctggattgaagaccccttcttttaacatatggatttcatatttatagggagcatatgcttttttttctttcatttctgacggaatatatggggtttccagaatttttggaatgtccagaaagtctttgtggtgtacgatatggcagatcgcatcaaagccaatatgaccaaacccgatattcgcatgacggtctttggcagctcctgggatattcttactgtcattgatatgaaatacggcaatctgatcttttccgatcagacggtcaaactgatcgatcacttcatcgaaatgatgaatgatatcatagccactgtcactggtgtggcaggtgtcaaagcagacccgcagtttgtcgctgcatacaacaccatcatagatctgtgccagctcctcaaatgtgcgtccaatttccgaaccttttccggccattgtttccagggcaatattacatggagtttccggggtcagaaccatattcagccctttgatgatctgacgaattcctgcttctgtgcctgcgcctacgtgagcgccagggtgaaggatcaaagtgctgcttttgcatgcggcggttcgctcgatttcttttgcaagaaattcgactgccagttcaaaagtttcagatttgacagaattccccaaattgatgatgtaaggtgcgtgtacgatgatttcatcaataccgtgttgtttcatatattcccaggcaggagtgatattgagttcgctgatttctttgcgccgtgtgttttgaggagctcctgtgtagaacataaatgtgtttgctccataagaaactgcttcttttgcagaaccaagcagcatttcttttccgctcataccgacgtgtgatcctaatttcataaaatagtcctcttctttccttattaatcaaaggttattgctgtaaccttgttataaatcccaacggatacgtgtacaaacaacttgccgtaaagcattatacatgataaaatagcaaaatgaaagaaaaatagaacggagagtggaacagaagtgaaaacattgttggaacggattacaatagaaatgaaggaagcctttgagaaagccggctatgacgcggcttttgcaaaagtaaccttatcaaaccgcccggatctttgcgaatatcagtgtaacggagcgatggcagcggcgaaaacatataaaaaggcgccgatcatgatcgcaaatgatgtcgttgcaggattgcaggagaaagattgttttgaaatggcagatgcagtcaatccgggctttatcaatctgaaagtaaagcctgcatttgcggcggcatttctgaatgaaatggcagcatctgaaaagctgggagtggaagaactggagtctccgaagacgatcatggtagattacggcggaccgaatgtggcaaagccgctgcatgtgggacacttgcgttcggcgatcatcggagaaagtgtaaagagaatcctgcgttataaaggaaatcaggtgattggtgatattcatctgggagactggggatatcagatgggtctgattattacagaactgcagaagagaaagccggaacttccatattttgatgagaattttacaggagaatatccaaaagaagctccatttacgataggagagctggaagagatctacccaacagccagtgcatatgcaaaagagcatgaggagtatcgggaaaaagcgctgcaggcaacatttctcctgcaaaacggacatccgggattccgggctatctggaatcacatcatggccgtttcagtggcagatttaaagaaaaattatgcaaatctgaatgtgtctttcgatctttggaagggtgaggcagatgcgcagaaatatattccaggtatggtagagatgctcaaagaaaaaggatatgcacattatgatgaaggtgctctcgtagtagatgtacaggaagagactgataaaaaagaggttcctccatgtatgatcctgaaatcagatggagctgcactttatgacaccacagatttggcaacgctggtagaaagagaagagttgtatcagccggatgaagtcatctatgttgtggacaaacgtcaggaactgcattttgtgcaggtgttccgttgtgcaaagaagactggaatcgtaaagccggagacagaactggaatttttgggattcggtacaatgaatggaaaagacggaaagccgtttaagacaagagaaggcggtgtgatgcgtctggaaaatttgatccgtgagatcaatgaagagatgtacaaaaagattatggacaatcgtacggtttctgaagaagaggcgaagaaaacagcgcagatggtaggtcttgctgcgatcaaatatggagatctgtccaaccaggcatccaaagattatgtgtttgacgtagatcgtttcacttcatttgaaggaaataccggaccgtatattttgtatacaattgttcgtatcaaatccattttaaataaatatcaggaagagaacagcctggagagcctggaaatccaggaagcatccagtgagtttgaaaaagtactcatgctggaatgtgcaaaattcaatgatgtttttgagactgtttatgaagagacagcaccgcataagctgtgtgcctatatttatgatctggccaatgcattcaataagttttatcatgagacaaagattctttcagaggaagatgtgaaaaagaagcaggggtatattgccctcttaaaactgacaaaagaagttctggagagttgtatcgatctgcttggatttgaagcaccggagaggatgtaggatatgacagaaaaattgttttatctggacagtcatctgcagagattttctgcacaggtagagcagtgtattcaagatggagaacactggcagatcgtattggaccggactgcatttttcccggaagggggagggcagtatgcagatacgggggttttggacacagtgcaggttctggatgtacaggaaagtgacggtgtgatttttcacaggacagatgcgcccatacctgtggggagcagtgtggaaggaaagatcgactgggaacttcgctttatgaagatgcagcagcatacaggagaacatatagtttccggactggttcataaaagatttggatatcagaatgtcggctttcatctgggaagtgaagactgtaccatggatttcagcggcgagatcacaagagaagaacttcgtgagattgaatgggaagccaatcaggctgtggtgcagaatatcgaggtggaagtgacatatccggatcaggaggctcttcagacgcttgcatatcgcagcaagatggagatcgaaggacaagtacggattgtgacgattccgggatatgatgtatgtgcgtgctgtgcaccccatgtgaaaagaaccggagagatcgggcagattcgtttgatcggcatgcagcgctacaaaggtggtgtacgtgtgacaatgctctgcggattccgtgcattggaagattaccgcagaaaggcagaaagtacagagatcatttcttcggcattatgtgtcagggaagaggaagttgcgcagggtgtggacaaattaaaagcagactgtgcacaatggaagcagaagtatgtacagttaaagcgggagatgattgcgcttcgtgctgtgaaactggcttcccaggcagaggatgtaattgtgtttgaggaagatctggaaggagaagagctgagaattctgatgaatcttgtgctggatcagggaaaccgcctttgtgcagtgttcgcaggaaattcggattgcggatttcgatatgtactgggaagcaggacattggatatgcgcccgctggcaaaaggcttgaatgaaacatttgaaggaagaggcggcggaaagccggagatggttcagggaagtgtaaaagggaatgtggacgagatgagggcatggatacaggagaaagcgaggaagatgaatggatagaaattcggaaccggtgaaattctggcatgtaggcggtccactcttgttgtattggctgattcagtttgttgcacaactggcggcagagcttgtggtaatgatcccgaatattgggcgtgttatagattatgatgcgctggaaaaaagcacgacaaccgaagaaatgacagaagtgctgctggggagtatgcagggaatgtatgagattatcggagaatatatgtttccgattcttgcatttggagcattgtgtacattgcttttgacagttccgttgtttttaaaagacaggaaaaaggaacgtatgcagcatatgcagactgtcaaaattccgggaataaaaaaatatctgattgtttttgcattgggaagtgcattttgtatcgggctgaattgcctgatgatgctttcaacactggcattgtcttctctggaatatcatgaggtgacgatgcagaccggtgtgattgttcagattctctgtacaggagtgattgtgccgattgcggaggaagtgatgtttcgtgggcttgttttcaaacgatttcgtgaaagaagttcgtttttcagtgcagcgctgctgtcttctgtgatttttggattagtgagcggaaatacgatgcagatgctttatgtaggggcattgggaatgctgcttgcatacacgtacgagatttgtggaacgatcaaggtgcctgttgtgctgcatatcagtgttaatgtgatgggcatcctgcttacggacagtgttcttggaacatggctgcttggagatcttatgcggatcggaggtgcagtgatcctcagtgcatttgcaggatcttccatgtatgtgctgctgcggagaatgaagccggaaccggcacagattccaccagttgaataagctgtttatagaatagattacggtttgcagtcaagactgtgaaccgtaattttgtttatcaatatttaagaaattttacattgactttcaggagtcggcgatttataattcatacataacctgatcagtggaagttcttccggcagaggttatgacgttcaagggggattagaagaccccgtcaagagatcaattgttaatttctaacagatttcaattattttaaaattttatacacatataacatttagtctgtggaatttgcagactcagttctgatattcctgtctgagaaaatcatttctattttatcttacgatcagtcttacagatttccggaatgcagaaatatttatttatcggtttaaactttttaagtttaaataaacaacaacacttttgaagtggattttaccagaaaggaggaaatctgatgagaagtacgaaagatgaaaaaggatgaaatcctgtttcatatcactagaaaaacagcaaatcgattaaaaatgaaaaggagttaaaaattatgaaagcatttatggaagaatatggagtaatcgtagtggcagcaattatcatcatgatcattgtggtggcggcatccccgattggagaaagcatcaagagtggaattatggaagcgatacagaaactgacgaatgcacttgcgtctactgagggacttcgcatatgaaaatatccagagaagcatgggatctgaaagaggaatgcttcgggccgctgcttccatatataaaagatcaccagattacagacattaattataatggaacagatgtatggattgagcatttaacgtatggagttcgaaaagctccggtggaattgacaccggagtttgtacagcggtttagtattttgatctcgaatgttgtaagtgaacagatcaacaaatataacaatgttctggaagctgagacggacactctcagaatttcaattatccacccaagtgtaacgaatacagggtattccatttcaatcaggaaaactccggcggtcatgagaatgacagaaaaaacaatggtgaaggaagggtattgttcacaagaggtgcttctatttttgaaaaactgtatgagagcaaagttgaatatggtgttttgcggatgtccaggagcagggaaaacagagttgctgaagtttttgacgcaatttattccgaagcatgaaaaagtaatgacgattgaagataatttggaaatccattatcgcgagatcaatccaggagcaaactgtgtggagttaaaagtggatgaagagtttttttcttatacaaaagcaatcaaatccgctcttcgtcaaaacccacagtgggtgctgttgtcagaagcgcgttccatagaagtaaaatatcttctggaatgtttttctacagggctgcatggtctgactacgcttcacacagatgatacgaggaaaatcccggatcggatccagaatatgatgcaggattcctatgcagcatccagattagagaatgatatttacagttttgtgaatgtcggagtattactcagtaaaagagcagtgggaaatggaaaagtcattcgtatggtggatcagatttgcctgtttgatcgatataatgaacagaataagaaaagcctgattgtggaaaaaggaaaaatagtgtccagagaaatttctgagaatatcagaaaaaaatttcagtcagcaggaatggaaaatccactgtaaggagaaagagagaggcagtctgtgtgcagaaaagagtaaaaaagaaaaagcgaaaaaagggtgtacttcaatattggaatcccaaattgctgaatctggagattcagcgatgtggatacacattccgtgcatcttcttatataaaatatttactggcagtctatcttggaattgcaggatttgcgtatttgtttcaattacaattgtttttcgcgggaattgtgatgattgcagcatctgtatttcttccggcagtatttttgatgaactacaaaaatctgtatgaagaaaagaaatttgaagatttgactgcttatatggaacagcttttatattcatttaagcgccgtgcaaaaatattgaccgcattagaggataccaaactgctttttgttcaggggaaaagcagattgtatgatggaattgagtatgcagtcagtcatattcagagtgcacagagcggaggaaatctttatgaggaggcgttttttgaaatagaaaaggaatacggatgtaaaaggctttataaaacgcacgattttttgataaaagtagagcgtgcaggtgggaatccggatgcggcaattgaaattttgctaaatgacagaaaaatgtggattgacagaatatatggactgcagaaggaaaaaaagaatattaagattaaggtgacgatcgggatcgggctgtctcttttgatctgtgctatgagtattctgatgctgcccagagagtttcacattatacaaaatccggtttctcaggctgttactgcggcaacaataattttgaacatgttgatctggtatgtggcgcagaaaaaactttccggcagtttgatcctgtcagacgaggatacacagacgtctgaaatatgtgaaaaatatgaatatgtagtccatggggaccggaaaagggaaaagataaagtatatgatctgggggattgcttttgcagggagtgcaatctggctgcgggatattgccgggacggctgcagcggcagcagcatttggtgcagccggctggatgatgacgcaggaaaagcgaaagtatagaaatgccagaaaagctgtggttcgtgaagtggaaaaacgatttccagaatggctgatgaatctctccttacagcttcagacagacaatgttcatgtctctttgaaaaagacaatttcagatgcaccgcagatcttgaaaaaagatgtaatccgtcttgtagaggagattgagcaacagcccaattctctccatccgtacatctgttttatgaaagaatttcagattccggatgtgttgtctgcaatgaaaattttgtattctatggcggcatttggaactggtgagatgggaaatcagattgatgcactggtgcagagaaattccgttatgatggatcgggcagaacgtttgaaagaagaagatacgatggcgggggtgggatttctggtcttgctcccgatgattacaggtgttgtaaagatgttggccgatctcgttttggtcataatagaaattttgtctgtagtaaatacaatttaaaaggatggagaaaagagggtgatagcttgaaagaatttttagaagaatacggggcgatcattgtgatttcggcagttggatatgctgtcatgtctgggttatggaagattttaatccagatcagtacggtctgaaagggagaaggtcagaatgaaagaatttatagaagaatatggaggtgtgctcgcagcatgtatgatggggatactgctgctcgggatgatgtattcactgattgcttcagacggacagatacatgagatggcagagctgttttttgatgggatgggaatcaaaacgacaggaggcagaacatgaaaagttttatggcagaatatggaaggatgatcgtgttgtccattcttttggcaatcgtgtttgcttttttatggagtcgaacagaaagcgggtatctgggaatgctttctgatacaaagccgaaattgctcttaaaggagaacgacaatgtggatgatttggtacagttaaggccgcgtccggagcctgttttatcggtatctgtcagtaaactggaatatcaacgggaatacgatcttattcatggaaaagaaatccatgcaagtgccgcggatgcggatggaaacagtctgcccgtttgtgcgataaatctggttgctccggatggaagtgtattggaagatgactggaacccggagaagttttatacagatcagagaggtgtttatgaaattacttatcaggcggaggaaaattatcagggagcatacattaagaaagtaaagaaaacgtgccgttttacagtggattaaagcgcaggtgaaaggaacaagaaatgaaaggtgcaattgaaacaatgacaggagttgtattgatcgcttttatggcggtgttaagtacagcgtacatcagtgcatcactgaatacacaaaaagcgcagacatatcattctacgatcataacagaaattgaagcgagcgattatagtacggaaattatagaaaaatgcagaaagaaggcgctggaaaatggatatgacaatctggatgtccaggtggtgaccagcgctgcgggaagcaaatatgcaaaagtgacattgacatatcgttattcgattccgcttttgaatatgcttctggaacatcagattacaggatacgcaaaatagcaaaacgaatggaagggagaaggaagccatgagacatgcggttatgggcttttttattgtgatgatgctggttttgacaggtgcatccatttatacggcggaaacaaaaacgatgcataaaaatgaattagacagtattcttggagcggcgctggaagaatctatggaaattttaacagtgaatcctgtatattccattggaaaggaaacagatggaaaggagctggcagcagattttatccagaatatgctgatacgaacgaccagcaaatcaatgtttgaaatagaaatcctgactgcagatgcacagaaagggttattggatgtgcgtgtaacagagcattttcgccaaatatggggaaagggaaaagtcgtttccagaaagactgtgatactagatgatgtccagaagaaagaagaaactttttcaagaatctcattttggaaaatatatcagaatgaagatggtcaggaaaagagaattataaaacaagtggtgcttccggagggaattttactcccggcagaaattctgcctgtagaaacggaacagagcaaggagcagatcagaggatggaaattacgcggagagtcaaaagatatagtatatacagagcagaacgtagggacgctgaaagcagtcggaaatctggagtttgaggctgtttacagggagaaagataaaaataaaacggtttcagatccgctgagttgatacagtggggtgttgctaaagaaaaatattacaaaagtattaaaaagttgttgctttttcatcacctatcgcctataattcttatagtataattaaacttggcagtattaccacataatgtttataagattctgcaaattatgttgaaaaacgatgtaaaatcatgtattatgtaaaatatgtggggacataaataagaatattaaggataggtgaaaatatgaaaatgaaaaaagtgcgaagcgtacttcttgcggcagcattgacatgctctatggtagttacaccggttatggctgcgccaaatgataccacaagtcttcagaatcagaaagaatcagcacagaatgaagtgaatggacttcaggcacagttgaatgaattgtttacaaagacgaatgagttggaaacacagctgatcacaaaaggtcaggagatcacacaggctcaggcggatctggtagtggcagaagagaaaaagcagcagcaatatgaagatatgaagcttcgtattaaatatatgtatgaagaaggtgatacttccgctttagagcgtattgtcgcttcaggaagtatttcagagatgctgacacagacagaatatgtggaaaaagtacatacatatgatcgtcagaaacttcaggaatatgcagagacggttcaggaagtggaagatttgaaaacttctctggaagaagatatgacaaaactgcagaatctggatgaagagtacaagacacagacagcagaagtatcaaatatgatcgagtccaaaagagcagaagtgtcaaatctggatgctatgattcaggaagcggcaagagcagcagtggaagcagcgaaaaaagagcaggaaaagaataacagcaataacaacacaaacaattccaatacgaatacaccatctggaagcggaaatcaggatacaggaaatacaggaaacggtggtggaacaccagctccaaccccaactccgccttcgaccccaaccccgacaccggatccggaacctggttacaatccgtctaccggaaatgcagtcgtggatcgtgcatacagctgggtaggaaaagcggaatatgtatggggagcatgcagcccgggagcgtttgactgttccggttttgtatcatattgtctgactggcaattatgctcgtcttggtacaacgtatacattccttggatggccgcaggtaagcaacccgcagccaggagatgtggcagtaaatgcagagcattgtggaatctacatcggcggtggccagatgatccatgcagcaacagaaggagtcggtgttattgtaggaccggttcagagcggtatgatttatgttcgttactaaagaaaagttcatataaaatacaaaagagaaaccctgatggagaaagaccatcagggttttgtgctgtaataaaaattagtgttttggaacaatttccagccagtatccatccggatctgagataaaataaattcccatgcccggattttcatagcagatacatcccatttcttcgtgttttttgtgtgccgcctcgaagtcgtccacttcaaatgcgagatgtatttcgttgtctccgagattatacgggcgatccatatcgcgaagccatgtgagttccagaaggtgcggcgtcatgccatcgcccaggtagacaagtgtaaagcttccgtctgctgcgtcttttctgcgaacttctgtcagatccagcgcttctttataaaatgcaagagatttgtcaaggtccagtacattcaaattgttgtgtgcaaatgtaaatttcatagagtagatcctttcttttttttctttttttacatcagcataccatagaaaatccttgcaatccagtactttctatgatatactactaccgttgtaaaaaaacacgtatgcgtggtatcactgaaggtgcctaagtttgttgaagagacaagccggtctcagtgtaaagagagtatacggaagtagaaaaccaatttggaggaagaaacatgagcgttatttcaatgaaacaacttttagaagcaggtgttcactttggacatcagacaagaagatggaaccctaagatggctccatacatctacacagagagaaatggtatttacatcatcgacctgcagaaatctgtaggaatggttgacgatgcttacaaagcagtttctgacattgcagcagaaggcggcacaattctttttgtaggaacaaagaaacaggctcaggatgcaatcaagacagaagcagagcgttgtggaatgttctacgtaaacgagagatggttaggtggaatgctgacaaacttcaagacaatccagagccgtattgcacgtctgaaagatatcgagagaatggcagaagacggaacatttgacgtacttccgaaaaaagaagtaatcgaattgaaaaaagagtggacaaaactggagaagaaccttggcggaatcaaagaaatgaaaaagattccggatgcaatcttcatcgtagatcctaagaaagaaagaatctgtgtacaggaagcacacactctgggaattccgttgatcggaatctgtgatacaaactgtgatccggaagaactggattatgtgatcccaggtaacgatgatgcgatcagagcagtaaaattgatcgtttccaaaatggctgatgctgtgatcgaagcaaatcagggagcagcagaagatgcatattatgaggaagctgaagaagcagtagctgaagagactgtagaagcagaataattatgaacgtaaatgcttcagcctgaacatcaggttggagcatttttggtaaactatttcaattcatggaggaaaaaatcatggcaatcacagcaagcatggtaaaagagttaagagagatgacaggcgcaggaatgatggactgcaaaaaagctctgaatgaaacaaacggagatatggacgcagcaatcgagttcttaagaaagaacggacaggcaaaagctgagaaaaaagctggaagaattgcagcagaaggtattgtaaaagctgttgttaaagatgataaagtagcagcaatcgtagaagtaaactctgagacagatttcgttgctaagaacgaagagttccagggatttgtagatgcagttgtgaatcaggttgcagattctgatgcagctgacatggatgcatttatggcagaagtatgggcagctgatacaacaaagactgtaaaagatgctcttgttgaaaaagtagcagtaatcggagagaacctgaacatcagaagatttgaaaaaatcgtgacagatggatgtgttgtagattacattcacggtggcggacgtatcggtgttctgatcgaagctgagacagacgtagtaaatgatgacatcaaaaaatgtttgaagaacgtagcaatgcaggtagctgctatgtctccaaaatatacatctcgtgcagaagtttctcaggaatacatggatcatgagaaagaaattcttcttgcagcagcgaagaaagaaaacccagaaaaaccggaaaatatcattgagaaaatgattatcggacgtctgaataaagagttgaaagaaatctgtctgttagatcaggcatatgttcaggacagtgaccttacagttgcgaaatatgtagaaaaagttgcaaaagaaaacaatgcaaatgtaactgttaagagattcgttcgttttgaaacaggtgaaggaatcgaaaagaaacaggaagactttgcagcagaagttgcagctcagatgggaaactaatttatcaatcgcaagactgataaaaagcgaattaaatagcgaatttaagcggtttctggctattttgacaagtgttataaactactgtaaaatctcacaaaatatcgtgctattttgggtacagattgggtagggtattgggtaaagaaatttacccaacctcttaacgagaaatttgcttgttgtttaaaaatagaaagggaacgctgtgaatggttgagggtgtattgtattttgcaatacacccttaaattttttgggaaaataatgttaaagactaggaaatgtgttagaatgaaagaaataaacaaattagaatttggaggataataagatgttagaatttaaatatgatactcaacttttaatagaaggcgaaaatcttgacgaagataaaattagcgaatatttcacaaacaattttaacggagattgtttgttagcagttggagatgaagaacttataaaaattcattttcatacaaacgaaccatggaaagtattagaatactgttcacagcttggagaaatttacgacattgttattgaggatatggacaggcaagcgaaaggtttaaaaggctaaattccagtttgtagcagacagttttggtaggactgtctgcttttccttttcaatcataattgatagtggtgctataaaatggttcatatccattgtgaaaagaccatttagaacggtgcagattgattgtaagggtggtgggagttccgttgatttgattatgctctgcttcgatttctgccaccacttcatcaatattccagtattgatatacaataacttgtagttcggtatcacgattagccccattgctgaatgacatactgttaaatacaagataatcgggcaagctaatgtaatagagaacacctgcaagcaagactagaataatagtggcaaataacaatttctttttcattttgacatacctctgtttctatatagttatagggataactatatagtacctcactatatagtgaattactacataaagatttattgaatatacttttatgtagaggtgaggcaatgaagtatggacatttggaacttcacatagaggaactgctgaaagaaaaaggaattagtaaaaataccatttgtaaagaattggatataccgaggtctaactttaatcgttattgcagaaatgaatttcaaagattagacgcacaactaatctgtaaactgtgcagttacttggattgtggaatagaagaattgatagagtatgtaaaagaatgagagcctgtcggattgaagaaaatttgagcaggcttttgttgcgtcaagaaaaagagaaacgtagtgaggtcaaggaacaaggcgaagccgatacgccgtagggcagtccttgacggaacggacgtagccaacagcactatgatacagcagaggacttgtaaggtcagaaaccttgcaagtcctcttggctgttactgggcaatgtgttttaagtagagcgattcttttatcagttccttttcaaatgccttgatgtgaccgtcgtgtattccgttgtcgatataaaagcaatcgtcagtttgtgagtaggcaagtttgctaactttcggttcacaggtctttgtctcaattccataatagtaaatcgtggcggttgttaataccatgtgaatactttcaaaatctcttgtaaaaatagtatgcctgtcggaatagaagaaatcagacggacattcatagaattgggaactatcctctttcaaaaataatggcagtatgtgcattgcatttccagcacgattgacaaggacataaaagcgtggaatgagggcggcatattgggtcatcatggcaatatagatatcgtctaaattatcaagaagatactcggaacaggagttgttgtaaaagacatattgcagagtgttgtcactttggcttgtgtgttccataggcacattttgtccgtaaagccaccgcaagtctacatctaaagagtctgcaatcaattccattttatcggcttttgggttgtactgtcccgaaagataggaactgaatgcccctttgctgataccggtatctttgactatatctacctgttttttattttttgctttcatggcaaatttaatccgttctgcgattgtattcatctgaaaaaacctctctttccatatctcgttataacttctcatatcttatcgtctaaggacactataccacaagttcagaaaaaagaaaacaaaaagtttataaaaaactaaactttgtattgcaaaacgaatgtgtctgtgctaatatacaattaagttcagaaataactgaactgaacgacgtcgtaataggaaaataaaaatatgggaaactgacctatcggttcaacggggagaaaggaacgtgtatgcagattacattgacaaaagaacaggtaaaagaagcctttggagaacttcgtttcatgggtgcggataactgttaccgttatgataaagacagtaagaagaaaacagaggaagtggaagccttgaaacttcatcttggaagcatgaaacttgggaacagcgtggatattcgcttggaagcaacggaacttccgaagattgagccttatgctgtggtggaactggaagaaccagtttatgccccttatgtgcagagagggaatttccctgtattagtggagaagattacctgtaagggtatccgccctgttccaaacaaaactatgtaggcggtcaaagttcctgccctcgttctgacgtatcaaacggcaggttgagggcggggcaatggcaacgccattgcagataaggaggtttgataaacttggaagaaagaagtggaagttttcttccagaactcccctacactaacaggggagtaatacggcagaaagaagaattaagtgctttgatagattggtgtcagataaccattaaggaagttccgttagaagcagtcatagaagatgtgttgagaatacctatggaacttatgacggtaacaggctatgaaaaagggattgcaggacatgaggttgtggcaatcttcgataatatcaaggtgctaaagccgacaggaaatgcacagtatcagggctttcagattttaatgagtggaaaaggctgtcgcaactatgaaaattttttacaactcaatgaggaaacatggtttgatttcttaaacagagtttgtcagtatcacatcaatgttcctcggattgatttggcgatagacgacagaaaaccgtatttgaatattcccgatttgattatacggacaaaagagggattgctttccacaaaactaagggatatagattttcacgactcaggagaattgaaagaggaagtgtttcagagtaaaggtggaagtctttatctcggcagttcagccagtaatttgagattggtattttatgaaaagggatatgagcagaataaaaagtatggaacagaattagaggaaaattggaacagatatgaattgagatttcggcaggaaatggcggtaagtgtagtacaggaattattgagatatagagatgtggcaggactggcaatggaagtattgaacagcaaaatacgatttttagaaaagccaatggacagtatgacaacacgaaaaaggctttatccaacctatcaagcgtgggcggaactgatgaaagatataggaaaggtgaaacttaccatgcaaccgcagaagaaaagtctgcaaaaggtgtgggagtggttagaaaaatatgttgcaccgtctttgaaactgtttgcagaggttggaaagatagagaaaagagattatatcggtaatctagtgaaaaatggagaaatgaatatcacacagaagcagttgtatgatgattatataaaaacaagaaaattaggcgaaaggggataatcgtatagaaaaagcattattgaatttaaaagaggtaagtgagtatcttggacttggagaaacaaagacaagagaactcttgaaaagcagaaactgtccgttttccatgaagattgggtatcggtggtatgcgaacagacgattattagatacatggttggagcaacagacaaaaagttattgaagttctgattgaaaaggaggcgaacttatagtagtatatggttaaaatcacagaagttccctttttatttatcaagacattcgattgatagaaagggtagagattatgggtaaagatttaaaaggaaaagaattaggaacaggtttacgtcaaagaaaggacggtagatacgaagcaagagcaaagataaacggaatagacattaacttgtatgatgttgatttgaagaaattaaaaatattgtttgaaaaggcaaaagaagaagcaagaaacaacattgatataaaacgtcagaaagtaacgctgaatgaatggtttgaggaatggtttacaaattataaaattcctaatatcaaggaaacaagcgtgtttcctatgcgtagcaaatactataatacatttggaaaagcaatagggaatatgaaagtgacggatatacggaacttagatattcagcgggttattaacgatatgaataagcaagggagagcgtcttccagtatgcgagatgctttaggcagagttcgggagtgtttggagtctgcaaagaataatcgtattatagacatcaacccatgttttgaaatcaatgtaccctgggaaaataaaacagcagaaagacggttcttatcaatggcagagcaaacaagatttttgcaggaagtagagcataactggtataaagaaatgttttatattatgtttctgacaggtatgcgaattggagaagttggtggtttgaaatgggaagatatagactggaataagaaatgtatcaacattcaaaggtctttatcctgtcaatatgaaaatggagtaaagactatgcgactaacaaagcctaaaacacataattcatacagaagtattccgtttatggcagaaacagaagaaattctgttatctcaaaaagaaaaacagaacagacagaaaaaagcctatggaaatcgttggcgttcaagtggagaatttgataatttggtgtttactacttctttaggaagtccagttattcggaatgtagcagaaaaagaaattaagaaagtagtaaaagcaatcaattttcaagaagcaatagaagcggtaaaggaaaacagagagccgatagagtttaaagacctttatcctcatgcaatccgacatacattttgtagtaggtgttttgaaaaaggaatggacgctaaagtggttcaaatgcttatgggacatcagcattacagtacaacgattgacatatacactcatgtgacagaaacaaaatttgaagaagaaatagcaaagtttggtcgtgtgagtgaaaaacagaaagttcagaaaaataaaaactctacccagtgtgcataaatgagtacccaatatagcaaaataagagaaaattgctttcaatgggaatgaaaagtttctacccaaagggaaattgggtaaaacggaaaagcagaattaaggaaagcgtagaaagccttataaaatgggtatttgagaaaacagtaaataaaagttggcaaaacagatgggaaactaatcccccatataaacaagttgttataacttcataggacttattgaaggggctgtcgctttaacgattagtaaatcgtgaagcggcagcttccttttttctgattttcgctatatagttgctctgtttctattgaaacgatagctttttcgtaaaaaagccgtactttaatacaatccaaaactggatttgaaaaaaatttcggattctctaaatttatgcactcttcaaaggaaataaatgccttccagttttccctttttggattttgttatgaagtttatttacattttttgccattgccagcaaaacactttcagcaagaacattcgctgtgccacgactcaaatatctgcgaaactgcatatcctgtttcagttcaccaaaagatccttctgcttggatgcttctatttattctaagaagaattccttcgtcagaaagaatccgctccaaatcttcctcccgatatttcaaaaatgtttttgctacggaaagcactttgtttcgctcttctattggtgttttacagttattccccttgatgcactctttcttgtaaggacaatctttacattctttacattgataaatgtttttttcactgatatatccagttttagatttagagcgacggagatgtgtaaagggcagctgtttcccatttttacaaatataagagtcacttttttcatcatacttcatattttctatacggccgatgtcgtttttatattttctcttttttgatatttcataattcgatggtttgataaatgccaactgctgattttgatctagaaatacataattctcttcactttcatatccagcatctgcaatgattttttgatacttaaatgtcagatattcttctgtttcctttaagaagggaattaaggtggtagtatctgtgggctgtggtccgattgtcagccatacaatgtattcagaatcaactccatgctgtaaattaaatgctggctttaactgcccatttcccattgcatcttctttcatccgcataaaggtggcatccggatcggttttagaataactgttcctttttccacaaatatgcagtttttttgtatatccttttaaacggtccagatagtcttctaatgtttcgatactcttttgcagctgagtttttcgtttcccaataccatgtacaaatacaatgttttcttcttgttttaatgcgtacagctttttgcgtaaccgttttacgtgtttcattttaacagtatcaccgtgaacaatccgaataccataaagttgctcacattctgcaatgagatcggcgattttaatcagcaacttcgcctgatttttggttaccgtctttttccatacaaatgtatatttattggcgcaggcttcgatttttgtaccgtctataaaaatcgtttctcccgaaatttctccaagtccgtaaaggagattagacatttcagcgagaattcgtttcgcacacggagcaaaatgaatacttcggaaacgggcaaaagtggcatggtcaggaactggttttccctctaaaagatacatgaaattaatatctcgcttacagttcaattccatagagcgagaggaataatcaccattcatataggaatataaaacaatcttcaagagtgttcttggcgatactgtatttattctttcataagtagaatataagtccgttaaatccatagcctccacaaactgactcagcaaccgcacagaatcatctactggaataattgtttctaagtttaaaggaagttttagttgatatccttcctcattcaaagtataattcttgtgtaataatataggggtttgcatacttatattttacaccaacagccaggcttttcgaagcctggctgtaattttttgcatagaaaagaggctgcgcactaattatttagtgcgacagcccctttttacgaggtctttctacgctttttacgcaattcgctatctcatctttcaattggtcatagatttcagaatcatctgccttcaataatgaaaaatcaggttacctcctatattgttgaatcaatatgccgacaggcaaacaagaagcagaatcaagaaaccccttgatttctatgttaaagagcagaaaatgtgctagaataaaagaaataaataaattcagcttcggtaaagtaattgagcatatagaacggaatgatatactgtttggcacaagggtgtcaggtaaaattcagcagggaggtgatgcacaatgatgagagaagaagggcggataaaagaaagcggcagggtagatctgcatcttcataccagaaatagcgacggggagaattccgttgatgaagtaatccggcaggctgcagaagaaggaatcaaggtcattgcaataacggatcataataagttttcgttaaacagaccatttacagagaaaaatatggagatccttccaggttgtgaattttctgcatcttatatggtttccgcacaaaatgaaacagtggaaattcatgtaatcggtttgtttccagatggcgttgatccgaatgattttacggggatttttgcgggaatacatgaaggaaaaaggcaatatgtcaaggcgatcctggaacaattggaagagcgggggatttctgtgagccttgaggaagtgcaggcagtaagcaggaaaagcggacatataggacgacatcagattgcagatgtgttgatccgaaaaggttacgcagaagatgtcgacgatgcgtttgatcgccacattggaaattttagtccgtattatatcccgtccaccagatatattcggtatgcgccgcttgctcaggcggtcagacagattgtggactctggtggaattccgattctcgcacacccatatgggtatttattgaatgaggagaatatagaaaagttaattgctgattttaaggaagtatcaggaaaaacaggcgctatggaagtgtactatgaactatatctggataatccaaagcgcatgacttttctgaaacgtatggcagagaagtatggattacttgcctctgcagcttccgatcgtcacagagaaggtcagccatatgcgacaacagatggcctcagtttttatagagagatggtacgggttttgcatcagaatatcgggagcgggtgatctgtagcacagggagtttggattgacgaacataagtcgagatgctataataaaacaaaaattagaaggatacacgcatgttgcgatgatgaatatggagggaaaaatgaaatctgaagaattttcacaaatgtatcggcattcattagcacatattttggctaaggccgttgtagaaatgtttggtaaggagaacgttcagttagcaatcgggccacagatcgaggatggtttttattatgactttttgttgcccagaagtctgactccggacgattttacttcaatagaagcaaaaatgaaagaaatcttaaaacgcaaagagaactttgtctatcgggaagtatccagagaggaagctttggaagagtttaaagatcagaaatttaaagtagaactgatcaatgatctggatgcagatgagacaatcagtatctatgatacaggagatgattttaaagatctttgccgcggaccgcatgtgggcagtgctgcagagctgttaagctgtgcatttaaggtgaagtccgtgtcttccgcttactggagaggaaatgagaaaaacgagatcctgcaaagagtatatgttatggcatttgaaacaaaggaagagcttaaggcacatcagcagtttttgaaagaagcaaaagagcgtgaccataaggttttaggtccgcagctggatttgttttttatggatcagactgctccgggaatgccttactggcttccaagaggatggaaattgttcaatacgattttggacttttggagagaagagcatgaaaaacgcggatatcaggagatctcttctccgctgatcaatcacaattctctttgggtgacatccggtcattgggatcattatcagcataatatgtttacgattgatgttgacgagaatacaacatatggtgtgaagccaatgaactgtccgaactccattctggtctacaagagaaagccgagaagttatagagagctgccattgagactatcagattgtgatgttttgcaccgaaaagagaagtcaggagaattgaatggtctgctgagagtccagatgttccggcaggatgattcacataactttattacagaagatcagatttatgaggaagtaaatgcaattctggatattgtagatttattctatggaatctttggtttggaatatagaccggagctgtctacaaggccagaggacttcatgggtgatattgcgttatgggacaaggcggaagctgctctgaaagagattcttgacaatcgttatggtgaagatggatatgatatcaatgaaggtgacggtgcattctatggaccgaaaatcgatattatgatgaaggatgctctgagacggcagtggcagatgggaacaatccaattggatttccagcttcctcgtaattttgatatcacatataccgataaggacggaagtgaaaagactccggtaattatccatcgtgttatttatggatctctggaaagatttattggaattttaattgaaaactttaaaggggctttcccgttttggctttcacctgttcaggttggaatcgttccaattggagaacaccatatggaatatgcaaaagaaatcgcagactcacttcagaaagaacatattcgatgtgaagcagagttatcggataatcatatgaacaaaaaaattaagtactttagaagctatcgagtaccatatgtagtagttgttggtgacaacgaaatggaaaatcagacggtttcagttaatattcgtggcggtaagcagatgaaagacattccgttgaatgtttttgttgacttgtgcaagagcttatctgcaacaagagcgcttcatttggttgagtgtaaagaagatatttaatagttgaatgaaatgaaaaagctggggagtaattatcctcggcttttttgtatttaaaatgagtgacagagagtaagttgagagaattgtgatgaattcaggagggaagaatttatgaaaagtactacaaaaacggtgattacaattgcgattatcgcagcgttatctgcagcgttagatttatttgcggtgattggtctgcctacagggatattttctgtatcaagtttttatttaagtgcggcattttatatgttatttgtttacttgtggaaatggaaaggggttgtcagtgtttatgttggaatgatcctggcttctttattttctggattttcactctttccgttgtatggagcgtggggaaatacattggcagcggtattgattgtatatgggatgaaagtgttaaagcgtaatatagaactgaaatccgtaaaagattatgcagcgatcgtgattctgtatgtgcttgcatccgccttatctggtttatgggtaatcggaggctgggttgttgtgggaattcttccatcagaagcgtttcagggcgcattgtttacctggtggttcggagatgttgtagtgtatctgattctgggaaccctactgatgaaatttgttgcaccgctgttaaaaagatttcatttagaataggaagtaatacgcaatcttatgagtggggaaaataaatggaaatagaaggaaaaacttccaaatatgggaaacgaaaaaatattctggggttttatatggagcagaatcattgttggtttcctttcaaggtattgttattatttgtggtatccggtgtgtttgtcaatgtggatatagcagaggggaatgcaatgattcctcttgtagtactgggcggattgctgctgctgaatattgttctgttgggacgatatgcgttcgttttgctgaagtttgtgattttatccattggaatgctgatctgtatatggtcactttttgtgtgtaaaacatggaatatcacagagacattgttcacagtcggttttcaaaattctgtgctccgtctggcagggctgtttgcaacaggacagttatttgccgggattacaacaaaatttgaaatattatattttgtgaaaaaacataaaatgccgatccatgtgtcactttttatgattcttttggggaatgcgttcgcaagctttcttgatgtatttcggaatgttctgacagggctgaaagcacggtgtaatctaaaaaagcatccgatcaaaaagatgttttatatgattcaggccatgacatttgaagcggtacatatgatcgttgatgcaaacaaatctttttatctgcatcacaggcggattgaagagagtcttggcgtaattgaagagtccggttctgttgaacaggaagagtccctttgtatggatgttgtgatcagaaatgtgaaatatcccggacaggaaacttgtgtgttgaaagaggctgcgattacggcggattgtggagaagtttttttgctgacaggtccaaatggaagcggcaagactacattgatcaatattttatcagagctcattccggaaatcataaaggcagattatgaaatcagctggaacaaagatcctgtgaacaaagagcggattggatttgtgtttcagggggtaggaaattatatgttttttgacactcctgagaatcttctggcccatataccgtatgagattgcaaacgactggctgcaaaagtttggcctgaagtatgaagatttgtttacgagatctgttgtggatttttcaagtggggaacaacaaaggcttgcgttaattgcagaacttttggacaagaaaaaaaggcttctgtttttagacgagccaacttcttttttagacagcagaggaatagagagtctgtatgaattgatctgtcatgtgaaaaaagaaaaaataatatgcattgtatcccacgataaaaaatgtattccgtgggctgacaagtattataagatagacgaccggtcagtctcaaaaggaatatggacacaggactgccggcagtatcatatttcgtttgctgaacataaagaattgctcctatctgtggaaaacgaaaagcttccggaaggcaggcttatgatatataagaaagattttctgtgtattacgggtccgaatggcgcgggaaagacaacgctggcatatcaaatcctgcaaacagcgcagcgccagcagaagacaatgaagtgtgctttgatgctgcaaaaaccagaccggcagatttatcaggtaacagtgctggacgagcttttgatgggactggataaaaatgaagctaatatagaaaaagcaaaacagtatcttggtgcaatgcatatgctggaactggagaaagaagtaccgcagtttttgagtggcggacaaaagagaatccttgtaattttaagtcttcttatgcagcagccggatgtattattattggatgagccgttaagttctctggattcatttcacgcagatgaaattataaaattgctcatttcagaatacaacagaagtgaaatgacagtgattatttttgatcagacagattcggtgtttgttccgtgcagcgaaaaaacagtatatttaccgggggaagaatgagatggaaaatgatgggtatatccgagtggatgagaatggaaaaatggagtcttgtataaaagggcagatagagcagaaatatcttccggttattgaagatctcgtagaaaagatctgtgagattggtggaagcaatatccggagtattttactgcggggaagtgtggcgtgtaataaagtgattccaggggtttcggacattgactttgtgatcatactgaaatccacatctgaaaagatgacacaagagatagaaatgctggcagcaaaagaagcaaaaaaatatcagcaagtttttacgaccattgatctgagctgttatgaatatgcggagtgtatacgaccggaaaataacagattgctgatgaatctcaagctcacaggcagaaaagtatatggagaagatatgatttgcaggcttccggatctgtactgcaatgaagaactggcaaaacggatctatgttcagacggtacaggaatctcaggagacactggaccggataaagaaacgggaaagaatctgttatatgggaatagaaagaaagccgtcttttttatgtgtttggttcatgagaagcttttgccgtggtctgattgcattttctatgctggagacaaaaagattttctttaaatgtgggcaacagttgtgaggagtttctggcatgttatccggaatatgaaaagcagatcagggaatgccaaaaattagaaagagaaccaagcgaagattgggagtatttggaatcaatctgtgaagaagtgctgttgcagtactgttctttgggaagaaaaaatgggtggtaatatggtatttcaggggaggatccttaaaaaatacatacaaaaaaagattatttttttgctgcttgtgaatgaggacgaaagacttcgatgcattataaaagacggggaacatataaagtttgaaaaaacaaaagaacaatgcaaggtcggaaatattgtgtgcgtcgaaggggatgttcagtgcggaaaagacggacatagagaacttctggcaaagcaagtgaatgtagtagtagaaaccagacttgcttcgtttgagacagggatgttagaagaatcaaagtttcagggagtcaaagcaagacaatattaccatacaatgatgcttacggatatggacagtatctgctatatgaaatccaggagtgcgatcattcaatgtattcatgcctttttcgcagaaaaagatttttgtaatttgagtacccctgtgttacagcataatttttatgccggaggtgcccggccttttgtgacgcatatgcttgacagtaattgtgatatgtatctgcgcattacatcagaaattgctatgaagcttttgaatgcaggaggcctttccaaaatatacgaagtcggggattattttagaaatggatcagtcaatgaaatgcattccgttccgttttctgctctggaagcatatcagacttatatttcgtacgaggaaatgcaaaatcttgccaatgagcttcttggcaggatctcagaatcggtcagtctcgtgtttcggaagtatggaaagcagagcagattgtttttggatgggaaaataccggaatgttcttttgatgaatttataaggcaggcaggatattcggagtttcggatagaggatttggaaacgtatccagatgttccggagctgcgggataagtcagaagatgctgttaaaaatgcaaaagtcttatataaatggctgaaagagactctgatcagaaagcagaaatctccgatatggatttcagatcttcctgtgggacagtcaccgcttataaagaaaaaagatgagtaccgtctgttccgcaaatatttgatcgtaaatggggctacgcttgcagagatcactcagagtgaaacaaatgtggatattttgcgggaaaacttagagcttcagcaaaacgatcaaaatcataggtatccacatgactacgctccgctttttcatgcatatagtctgggaatcccggaggtgtgcagtatgtttctcagtattgacagattatacccggcatttgcaggggaaaatagcattcaaagttacaagatgtacatatagcagctgcagagatctcgtttctgtacaagttggaaaaataggtttaaaatgtgagtaaagcattcgaaggaggacaataatatgcaaaattttgatttttattcaccaacatatttcgcttttggaaaaggcaaagagaaggaaaccggaacacttgtaaaacggtttggcggaacaaaagtacttcttcactatggtggaggatcgatcaagaaaaacggagcctatgacagtgtggtcagatcattgaatgaagcggggattccatttgtagaattaggtggagtaagacccaatccaagaagtggacttgtatacgaaggcattgagctttgccgtaaggaaggtgttgattttattcttgcggtaggaggcggcagttcgattgactctgcgaaagcgattgcactgggtgtcccttatgagggggatttctgggatttttatgagacagaccgtattgttacagaagcgcttccggttggaaccgtgttgacaattgcagcagcaggcagcgaaggatccggtggttctgtgatcacaaatgaagagagtcttctgaaatggtctgcaggtggtgatgcgatccgtccgaaattctctatattgaatccggagtatacatgtacactgggagcatatcagacagcttgcgggattacagatattttagtgcatgtcatggaacgctattttacaaacacaagacacgttgagacaacagaccgtgtatgtgaagcaattatgaacagtgtgatcacagaggctccaaaggtcatgggaaatcttcaggattatgaagcgcgtgccaatatcatgtgggcgggaatgatcgcgcataataacatagcaggtgtaggaagagaacaggattgggcaacacatgatatggagcatgagttgtctgcattttatgattgcgcacatggagcggggcttgcagtgcttagtccggcctggatgaaatatgtctataaacaggatgtgatgcgttttgcacagtttgcagttcgtgtgtggggatgtagtatggattttgcagatccggagagaaccgcattagaaggaattgcaagatgggagcatttcttacaatcgatcggaatgccattgtcatttgaagaccttggagccagagaagaagacattccaaagatggtagaacacttgagcaaacgaggcggtataggaagatttgtacgaattcttgacaaagaagcagaggatatcttccgattagcagtaaaataaaggaaaaatttttttatgttattgacagaaccaaaaaagaatagtaatataaaacaataataattactatttctatatttgaaaaagacagaagaaaggaagtttatgatgttaaagaataaagtagcggttgttacgggaggaactcgtggaattggttttgcagttgtaaagaaatttattgagaatggggcggctgtctctgtatggggctcacgtcaggaaacggtggatcaggcattggagcagttgaaagtgttatatccagatgcaaaggtgagtggaaaatgcccgagtctgaaagatgcagtgcaggtagcagagatgataaatcaggtaaaagaagaatttggaacagtggatatccttgtaaataatgcaggaatctctcagagcacaccgttttatgattaccagccagaagaattccagaaaattgtggatctgaatattacagcagtattcaactgtgcgcaggcagcggcaaagattatgaaagagcaggggggaggagtgatcttgaatacaagctctatggtaagtatttatggacagccatccggatgtggatatcctgcatcgaaatttgctgtaaatggattgacaaagtctctggcaagagaacttggccgtgacaatatccgcgtgaatgcagtagcgcctggcgttacaagaacagatatggttgcagcgcttccggaagctgtgatcaaacctttgatcgcaacgattccgcttggaagagtcggggaaccggaagacatcgcaaatgcattccttttccttgcaagtgatatggcaagttatgtaactggtgaaattctatctgtggatggagctgcaagaagctagttacagtgtttctaattatttttaaacaggatcacagttagggcgacagaaaaaatggggctgtgaaataagtccctaaaaggtggatgtgaaaaaactcaagcgagtttttttacatccaccttttttctggaaagaagaatcggtaagaactctgaaaataagagggggttaatgctgtttactatttttcgcagcaaggttttccagttgtaatatccatatatggagttgaataaataagcaacctacatcataatcatttttgcggcctatgatttgcaagaaaagagagaaaatagtcaagtcttgtatttgaaaatttttgtgatatacttgttattaacgaaaaaagaacgtataaaactaaaaaatgcaagaatatttatggggaaaatatgaattgcatcacaaaaaagaaaaatgaacgttgcaatggtgaaaaaaacggggaagaataagaatcgtataaaatagagtgaaaaatttgatcttttaataaaaaatgcttgattatatgaggaggaagcgacgtgaaaaaaaagaatgcatggcttcgatggatagcttggggacttctgttggttatgtgtatgaatcagattggaacgatagccttggcagcagatcccgccattgaaaagacggaaacggtacaggaaacgttatcagagaaagaaatgatatctcaggaagagtctccgccaggggaaaaaattctgtctgggacagaaggaataccggaagcagaaacaataccacaggaagtgattccgccacaggaggaaaagttgccggaaaacgagacgccgccggaaaacgagacgccgcctgaagcggatggttcagcggaagaaggaagcgtaccggagaaagagagcgcatcagaacagcagcccgcagtatccgaaccatccacgggcgtagaggagacaccggcagagccttatgaagtaaaacaggactttaatattgacttctatgtgatttatgaaaaggaaaagtttaaacttcagacaaatgggatttccggcattaaaacatggacacaaggacggaagacctatcatggaatttcggtggacgatctgatctctgtgtatgaagattttggatttataaaaggaattgatggtcagaatccggatgcgaatcagaagttcgtatctgccaacagaggaagaatcggcatagagtatggaactgtttatgaagatccgggctccggtaaaacgtatgtgtcatataatgatggagcagataaacagaatgtacctgtggatgtttactaccttccggaaggaaagggaggatatttgactttagagcccgctgtaaaaagagacaattctttttactcggtggaggtaaaaggggaaggacaggaccagatccactatgcgttgtatcaaagaacatttgaaatagcagtgtctgagtataatcccacattgccggcgcagacagaccgaattgaatggacttgtgtcggagcagacgatacgatagtagacggaacggaagaagcggggaataaaacgaagtttacaattggaaatatttcccagtcgtatgtgatccaaagagccgataagacagcgtttgatattcaattttatgtatatgtggataatgagatccgaaaactgccaagtgattctctgaaaagagtttataaatgggataatcagggaagaaattatctttccgtcagcgatctggcagagatttataaagaatatggactgaaagaaacggattcgcaattcggaaagtattttccgtatgcagtgcgcggagaaaagactttagcgcatgcggcgatggcaacacataaaggaaagcaatatgtgtcttatacattggacaatcagaacagtactgttccaacggacatttattatatgccaaaaggggcagataaagctgagaaagtaccggaagatgtagtggatggaagtggaactgtgacatcaacggttgcagaccagttgaaacaaaaccggcacagcttttattccgtgactgtgatttcgccggatggaaaccggacagtgacttatcataagaaagatgaagatgttaaaattacagtggatcagggcgaaacgaaagcggacgaatggcttggcatcagtgaggacgaacaaaagacaatacctgcagtagaaaatgcacaggagaaaaaactggaatttacgattcagaagatagaacagccatataccattgcatgcaatacattttcaccggaaacactgaatatcaaattctatacctttgtagattatgaaagatataatgtagagcaggcagagatccctgtgctgaaagatacgacaagtgatcagggaaccacttattattacatttcgaatgcggtattaaaagaacatttaaagaagttccattatgacggtctcctgcaaaatggaaatcgggagcgcttttattattccaaacgagattatgatactcttcataatgcaggaaagtatacacaaaatggtcatgactgtatttatataggaaagaccggtgagccaatggatgtgtactatctgccggatggacagttggcgccgatattgaatgcaaagacgctgatggaataccatgatgaccggtataatggattttacagtgtgacagtacaggatcaggagggacaggtctatagtcctaccgatttagaggtacttccggcaatcgattttgtcgcaagaaaaacaacgcttacaagaacggtaagcacaaagccacgtgtagatgggcagacaaaagaaatcaactgggaatgccgaagagaagacggtacactttccggtattccgggagtcaaagatgaagcaaagaaggaaatgagctttacgatccagccggaagatgcggtgagaccttatgtgatcgttccggataatactgagaaacctaaagaagaaaaagaagccaatatcagtttttatgtgtttatcgatggtgattataaactggtaaaaaatatcaacgctacgcagtactacataacaaaagcaaacagcggacgggacagtcgttattatctgcgggcaagagcagatgatacgatctcgcagatatataaggagtttggctttacaccggacaaattagaaccgggaatcgatggaaaagaaaagatactatttggatatgctacagacagccgtgtatttgtacagcatccacataaagataatgatggcacgtggtacattccggttctcaaaaacgggcatgatgtatcggtatactatttttcacagccgaatcccttgaatccggacaagattgaaaattattttgaccggctcacaggattgtcagctcagattggagttgcagggcgacggtttgatgtagaaggaagctttcatctggtggaagtcatggatccgttgaatctgacagagggaaaagctgttttgagagaatatgtggcacatggagaatcctattcagtagaagttccgaagaaggcaacgctggagggcacatatcagggaaaagagattgtctggagctgtacatcaaatgacagggatgcgcaggatgtttatccgaatccttcaggagaacaactcaaattcgaatggcagaatatcggatattcttatcaggtaattgcagataagccgcaggatcccggtacagtcagagtggtatatgatacgacccggtatatgaagaagatgccaaaagagcccaagatgacgcctcaggttggaaataagacgagatttattgaagatattccggaagataagaaaggaacatataagataaaatccccttatccgctgacttatgatcatgaggacaatgacagtaaagaactggaacagtacgaatttgaccattgggattacagagatggaaagggacactggcaggaatgttattcgggaatggagcttgccgagataatcaatgatacacagaaaccgattattttctatgcggcgtggagcaaggtgagtgatcggaaccgaaagcaggtacagttctatatctgtaaatctgcgatgccggaagacgggtcggtcgcattgccatcggtaaatgaagatgattacacaagtgctgttgccgttgcaaattgtaacgtatcagcaagccttttacatgatgtacctgtgcttggcaacaaaaatccaacactatgggaacattatgccaatggacataagagtgtgatgaagctgctgcaagggacaaaaccggatgaaggatacatcggcgatgaggattatatatacaaaatagatcgcattccatcggatgaagaagttttccaaaccatacgtgaaagcggacggaagatccgtatcggtgaaaaggagattccttcttctaaattagacacagaattttttacgatttactggtattccttcaaaagtgaaatgtcagatggatggcatattgatggacgtattgtagcgaaaaatgggtatctgactgtacagaaagactttgtcgggcagccagatgtaataaaagagatacagaaagactattacatcggcattgatatggatgaaaggttttcggatggaacgatacagcctccggcattccaccagcacatgaagttagtgcttccatcggaggaaagccagatgcctgcagcagatactccggatcagatcgtaggaacatgggacgatgagacacatacaagctgtacctggattgtcaaagccgatccgttttggaaatacacattaaaggaatacaattatcagccaaagaatcagacggtgcaattttcgggctggtataatgtccacaattctcatgagtccggagagaatgtaaatacctgggaattatatccggaaagtggaatcaaattcacaggacggggcatgggacggggtggagaatcccttaccattgaattggagaaccgttatcagaagccgggagtacttacattgaataaatttgatgtttctaccggacaggggatgaaggacattacctttgacgtcagtctggatggcgttgagaaagaatcggtaacgaccgataaaaacggaattgcagagattgcgattcctctgcaggatgaagcgggaaataaccgtacggcaacagaaacttatctgttgcgggagaagaacgtaccaattggttatatcgatccgggggatgttcagattacagttgtcatcaaagatggagcattcaaaatccagacagccaaactggttgacagaaaagcggaaggaacgcaaggtccggtaacagcgccggaaaatggaatgatcgatggaaaatccgtgttgacgattcggggagatacaaacctgaatatccgaaatttttcaaaaaacagtaagctgcatataaaaaagacatgggaaaacagaaatgatgctttgacggaaaaacaggtaaaagtgcgactgtatcagaacggaatctccacggggcaggaattcctgctgaatgaagaaaacggatgggagtataccattgaaaaagttccattgtttttagacacgaagccggtagaatacaaaatagaggaaatcgaaattggcaagactcattattcaccggaatttggggatggatttctttactatgaagtaatctatcctgagattcagtacaaagataaggataatcagccgctgttgccgaatcaggaacaagaatttcagaatgttgctgcgatagagctggaagttcagaatctacatttcaatctggcagaaagaagctttttaaagacggatgatcttccgagaaatcgtctcaaagatgcgaagttcatgctgtatgaagtaccgtataaagaaggtacttcagaatatgtggatgatacgggatatacagtagaatatcagaatggacaaagcacggatgcagttgttctgaaaaaggatagacaggagtgtactccgattacggcagaaccgtatatgacagatgaaagaggcatgcttcaaataccggatacgttgccaaatggcagatactggatggtagaaacatctactccgtataaaggagagaccggaaaagtccaatatcaagacaatttgtcattgtatatgctggatatagaaaatgaaatcctcttcttatatgaaaaaaatccggaaacaaacacatggaaaccactgacagacagacatgttgtcaatcatcctcaaaaaggaggggttacagttcagattctcaaagaagtaaccggtccgttcggagagttggataagccgtttactgtggaggtctcttaccgggaagacggtataaagatgaacaaacagattaccgcttcggttaagaatggtgaaatgatcacgctatcccatgtggaactgggatcagatattaaaattacagaaaccgtggatacatcaaaatacgatatttcactttcacaaaaagatcaaaacggcggctatttgcagggaatatcggcagttgaaaatcaaaatacagccgttatgacgcataagattaccggaatgccgggagatatcattgaactgaagattacaaatgagaatgtagaagatgcaacaccagatacaggaatcgacttagatgaggaaccgtatctatggatgctggtcatcataagtattgcatcagtgtttgggttctatcaaagaagaaagaaaaacaggctagacagtgagtaacagaataggagggagcgcgatagattcgaagagggtaccagaggaagaaaagagctggcagcaggaaaacaggattgtaaaatatttgcagcaggtgaagtttaaaaagaagctttttggtgtagacgaagcggacgtctggaaaaaaatacaggagttgaatcatatgtatgaagaatctctgcaatgggaaagaaagagatatgatcttctgttaaaagaacgtaccagaattcatgaggatgattccgagtgatgaaaagaaagcatcaaaactcaaaactgacagcagagcaggttattcaatccagaagaaatgcaattctcaaccgcagaggatggcaggagctgggagtaagagttgcaggtttagtacttgtattttatatcctgttttccagagtatttatcatttgtcagctcaatggaaactcgatgtttccatcattaaaagatggggatcttgttttgggatttcgaatggaacaagaaattcaaaaggatgacctgatcttgtatgagatggacagagaaatctgtgcatcgcgtgtggtagcaaaaggaacagattatgtggatatggatgaagaaggcaggctttatatcaatgggacaatccagtctggggagatcctttatcccacagagccgaaagaacttttgaaatatccttatcaagtgccggaagggtatgtctttgttctgggggactaccgcacaaaagcttctgacagcagagactttgggccactgccggaagaagcagtcaagggcaaggtgattaccattgtccgccgcagaggactttaactttgcagagaaacttgtaaacaaaggataaaaggagaaaaagtatgaagaaaaaattatccgcagtactggccgtgattttagcattctgcatgagtataccagtatttgcagcagggccatcagactatccaacaaaaggggatctggctagtgagaagacaacatttactatccagaaaaattatgtgaaattagacggagcaacagccgttgacagatatccggatgaaactttaaaatttaagtccacatgtacagccgctccagtggagccaggcagtgcaccaaatctgtcagtacgtgacttgtcaccagttgcagcagttacgagcgatatcacagtcgatgtgccggcttatacagtgccgggaaaatacaactataaaattgaagaacagtcaccgtctgtacatacgccgggatctaaagatactgcaggtgtggtatatgataagactccagtttgtattcaggttgttgtaaaatttgacaacggcgtgctgaaaaaaatcgtaacagttgcagaaaatgatactacaatcggagcaggcaatgagctgaatcagacaactgcaagcaaaaaggcagattttaaaaataagtatctgttagatggagaaattgatccggataaaccgggaccgacagatccaaatccgaacccaattccggatccagatccaaatccggatccgattccgaaaccagaaccagatccaggagaaactcctgagacaacagcagcaaaattcagaattatgaaacatgtacgtggacctcttgcaagccgtgaacaggaatttgatgtaacggtaacactgacgtcagaaaaaccagttcgcagtgacattatctgtaatgatggaacagaacatgtgattgcaaaagtaggagcgaatgcatctggttggacaggaaatgatgcaaacggatatacagcaacgataaatcttgccattaaaaatggagaaactgttaaatttcagggggttccggcaggagtatcttatacggtgaaagaggatgcaaagcatatcggtcagttaacggatcaaaatctcaatgatccatccaaaggatatacggtagcttattatggtggtggaacaaaattggataatccgacaaccgataaccctggaaaatatggagcaaatctttctgcaaccggtaccgttggatatgataagaataataacatcattatcagcaacagcaagggaatgaatacagaagatgaaaacatggtgaaaccaaatacaggtatcagtctggattctcttccatatattttgattcttggtcttgttgtacttggggcaggtatgatgattgtaaaaagccgcagaagaagagaagagtaaaagaagcagatagtggggatcctccgtagattcacggaggattctctgcaaaagaaggacagacaaaaggagtagaacagtgggatataagatttccgggtacatacagcgttttctgaactttttgatcagttttttgcttattcttatttttatgattgccgctgcgtatgcattgtttgtgttgaatgataatcggagaatttattcggcagcggaaaatgtgcaggcggatatgctgaaactaaagcccgagaaagaacaaccagatttttctaaattacgttctattaatcctgatgtctgtgcctggatcacaatggatggaacccatattgacttcccggttttacagggagaatcgaatctcacctatatcaatcgagatgtatatggaaaatttgctcttgcaggaagcatctttctggacagtcagaatgcaaaagatttttcagactcatatcatttgctgtatggccatcacatggatggcggaaatatgtttggggatctggacttatataaaaagccggaattttttgaaaaaaatgcgacaggaatactgcttttgccagatcgggtttacaacttgaaagtggcagccgtattggttacaggggtgtcagatccatatatctttcaattgaaaaattggccgaaagagtggccgcaaggacagctggaatacattcgcagtcatgccctttttgtcagagaagatatactgaatcagttggagcagtgtaaatccccacagatgatagctttgacgacctgtacatcggaatttacagatgccagaactgtagtgctggctcagatgataccggaaaaagagaagaacagggaggagtaatatgtgaaaaagcgaaaaagaaccctgctttctattttacttatagtgttagtattcagcataaattccatgcagagttttgcaatggaaacaagctttcaacttccggttgaaattgttctggaaggggacaggccagtgaaaccggagacatttatggtttggatgcgggcactgacagacaatgcccctatgccggagcaggcaaaagaccaaaaagttgtgatagagatacagggaaaagggaaaaaagaatttcctccgatgacatttacgcagccaggggtttatcggtacgaaatcacacagcagcccgggggtgcaaaacagtatcaatatgattcatgtgtgtatactgtaacggtgtattgtactgcagattcggcacagagactggaaacttcggttgtggctttggagcagggaaaagaggaagtgaaaaaagaggccgttcgatttgtgaatcgctatgaaacgcccaaagattcggcgcaatctaagaaacctgtgaaaacaggggatcgtgcgccaatcaacattttagtatgtatgctggtggtgagtggctttttgattttgttttttagcgtgaaaaaacacagggataaaaagaaaacagaagataagttttgaagatcaaaacggaaaatttaagatttcactttttgaagcagagaaagtgaaatcttattttatgtttccggctcaattttatgggataaggtcatgggattggtttggaatcggagacaattttcgaaattatgaatagagaaactttccttttctgaaagaaaatatggtatagtaaaaagaaaaacggatacatggagagaaaatatgaaaacgattatcataggaattgcaggtggaaccggttcaggaaaatctacatttacgagaaaattaaagaaagaatttaaagatgatgtggcagtcttataccatgacaattattatcgggatcaaagtgacattccattagaggagcgaaagaagacgaattatgaccatccggatgcaatggagacagaattgctgattcggcaattgctggacttaaaagcgggaaaagcagtagaatgtccgacatacgattatacacagcatacaaggtcagagaaggtggtgagggtagaaccgaagaaggttatcttgctggaagggattcttgttctggcggatgagcgtttacgggatcttctggatatcaaagtgtatgtggaggcggatgcagatgagcggatccttcgaagaatcattcgagatgtcaaggagcggggacgtgacatggaaggcgtagtggaacaatatctgacgaccgtaaaaccgatgcactatttatatgtagagccgaccagatgtatggcagatattgtgatcaacagtggaatgaatccggttgcatttacactggtaaaaaatacgattcagaaaattctggatgaagaagagtaagaaaggattttgccggaaaagacttctaaaaattttttttcatcataaattagaaaaaaatatagtaattctattggttttatagtatactttaaaatatactaaaaaagtaggaattgtaaagggtgagaagaaaggatgaaaaacatgaagaagattttgaaaagtctgccatttcagcttttgctgggagtggtaatcggaatcctgcttggactcatttccaatgaagcagtgatgcatgtgattgttacagtgaaatttgtacttggagaacttatcaatttttgtgtacctctgatcgtaatcggatttattgcaccatcgattacaaagcttggaaagaatgcatccaggattttaggggtggcagttttactggcatatgcatcttccgttttagcagcgctgggatcgatggcagccggatatggactgatcccgcatttgtcgatcgtatcggaagtagacggattaaaagagctgccggaaatcgtattccagttggaaatcccgcagattatgtccgtgatgagtgcgcttgcattttctattttgattgggcttgcggcaacctggactaaagcagataccgtgatccgtctgctggatgaatttcagcagatcgttctgatgatcgtatccaagattgtcattccgatccttccggtatttatagcacttacattctggtctctggcatatgagggaacgatcacaaagcagctgccggtatttctcaaggttgtgctgatcgtaatgataggacattttatctggatgactgttttatatacggtgggaggaatctactctggaaataatccatggaaagtggtgaagcattacggaccggcgtatatcactgccgtgggtacgatgtcttctgcggcaacgttggcagttgctttaaaatgtgcaagaaaatcagaacctgtattgcgcgatgatatggtcagctttgggattccgctgtttgcaaacattcatctttgtggttctgttctgacagaagtgttttttgtaatgacagtttcacagatcttatatggaaaggttccatcggttggaaccatgatcctattctgtgcgctgcttggtatttttgcaatcggtgcgcctggagttccgggaggaacggttatggcctctcttggactgatcacaggtgtgctcgggtttgatgcgacgggaacggctctgatgctgacaatctttgcattacaggatagttttggaactgcatgtaatgtgacaggagatggggcattgacaatgattctgacaggatatgcaaagcggcacaatatagaagagcaggttggaacggttgaattttaaaattatggaaaaggcagggggcatattgtgggacagccggcaatatgccccctgcctgtgggaattcttttactttacaacagaaaagacggattctataataaaataaaaagaagtacacaggagcagaggttatgacgataaaagagattgcacagcttgcacaggtgtccagtgcagctgtatcacgatatatgaatggcggatatgtaagtgaagagaaaaaagaacggatccgggcagtgatcgaagaaaccgggtatcgaccatctgtacaggcacggacgcttcgcacgaagcgggcctgtctgattggtgtgatcgtgccgaagatcaattcggaatcgatcagcagaattacggagggaattggacagatattggccaaaagcgggtatcagatgcttctgacaattacaaataacaattcttcgaaagaattagaatatgtggatctgtttgaagcatatcctgtggatgggattattctggtaggaactgtattgaccagggcacataagaaaaagttgaaagaatgtaaagtgccgatcgtggtgatcggacaatatacaaaagaagcaagttgcgtatatcatgatgattatggcgccgcaaaagcactggcagagcaagttggaagagaagcatccgggagggttgcttatatcggagtgacaagagaagacaaagcagcaggagctgcaagagaagatggatttcgggagggattgaaagaagtcggaaaagaactggaggaatcctgccttcgcagagcaaaattcaccatggaatctggatatgagcaggccgtggatctgttggaaaaagaacatgatatcgatatcatatcatgtgcgacagataccattgcggcaggtgcgattgaggcgattgcccagtattcgccggagagaaaaattcaggtgacaggatttggggataatcagtttttaaaggcagttacaggggggatccgaacggtacattttgcatatcagacaagtggaataaaaggtgcagagctgttactggagatgatagaatcagaaaaaacgcgcatgacggagatgaaactgggatgtgaacttgtgtaaaaagatttctggaaaaatagacaaaaaagcagagtataaattagtaaaaatgccatctttacaaatggcatttttttcattattataagcttataaaatatgaaatcgattacataaaaatacctaaaaggaaggaatgaaattatggattacaaaaaaaccgcacaggaaattttggttcacgtagggggcagtaagaacatcgtttcagcagcacactgtgccaccaggctccgtctggtgatcgcagacaatcagaaagcagagaaagaggcgctggaatgtgtagaaggagtaaaaggtgtatttgaggcatcgggacagcttcagatcattctggggacaggaaccgtcaacaaagtatttgaccagtttatagagattgcaggtgtgacagccagttcgaaagcggaggcaaaagaggcggcagtgaaaaatcagaactggtttatgcgggcaattaagcttttgggagatatttttgttccgattattccggcaattgtagccagtggatttttaatgggaattatgaattccctggattttatgaatgccaatcagtttatccacattgacactactagttcactttatgtatttgcgaatctattcagcaatacagcgtatacgtttctgcagattttgatcgcattttcagcggcaaaggcattcggtgcgaatccatatcttggtgctgtcataggaatgatcatgatcaatcctgcactgcagaatgcatatactgtggcaacagaaggggtacaggcgacccagtctgtattctttggcctttatgagattgatatggttggatatcagggacatgtgattccgattatcattgcagtatggctgatgtccgtgattgagaaaaagctgcacaagattgtcccagaggtactggatttgtttgtaacacctctggtcagtgtgtttattacaggctatttgactctggcagcgatcggaccggtttttgtatgggcagaaaatgccatcttaaattgcatccagtggcttttgacacttccccttggacttggaagtcttgtcatgggcggactgtatgcaccaacagttgtgacaggaattcatcagatgtatacagcaattgatctgggacagctggcacagtatggggtgacgtactggcttccgttggccagtgcagcaaatgttgcgcagggagccgcagcgcttgcggttgcagtaaaatcaagagataaaaaagtcaaggccctggcattgccttcttcattgagtgcatttatggggattacagaaccggcaatttttggagtgaacctgagatttttcaaaccgtttattgcaggatgcatcggaggaggatgtggtgcattatacgcatctattgttcacctcggtgcaaaaggaactggtgtaactggaatttttggaattcttctttgtctggaacagccagtacagtatctgatcgagatggcaattgcagtgggtgtggcattcgtggtttccttcattctttataaagacaaaaaagaagaacctgccaatccgccgacagcagagccgattattgaaaaagagacagctgcagttgtagaagagtctggattggaagagagtttaggaagtccggtttccggaacgatgattcccgttgagaagatttcagatgcgacatttgcacaggagattttgggaacaacgattgcagtagaaccagtggaaggaattctgagagcgccttgcgacgggacgatcttaagcatttatgatacgggacatgcggtttgtatgaccactgcatccggagcagaacttctgatccatgcggggattgatacagtgaaaatggaaggaagaggatttcaaaaatgcgtgtcagacggggagcatgttcatgcgggggatgtgcttttgaagatgaaactggatgagatccgaaaagaagggtatgagacaacgactatgatgattcttaccaatcctgatgcgtatcatgtggaaaaagtatctgcaggacagattggctgtggagaaaaagccatggtacttcagaaaaaataggagagaaatgatatgaatgcattgacaagagatcttgcagatctggtaaaaatcgtagaagcaaaagcagacggaaaagattgcttccgtcagaagctgcatttgatgccaccgacaggatggctcaatgatcccaatggactgtgccagtttcacggcgtttatcatgcattttttcaatattccccgttcaacgccaatggtggtttaaaaatgtggggacattataccagtgcggatatggtcacatggaattatgaaggcgtcagtctgtttccggatcagccgtttgattgtcatggagtgtattccggatccgcatttgtggaagatggaaaattgtatctgtattataccggaaatgtaaagctggaggatggagcatttgattatatccgaaccggacgggaagccaatacggttctggttgtcagtgaagatggaaagcagtttggaagaaagcaggaattgatgagaaacagtgactatccaaacgatctgacctgtcatgtaagagatccgaaagtctggaaagaaaacggtatgtattatatggtacagggggcaagaacacagtcagatgaaggaaaggttctgatatttgagtcagaggatcagctgcactggacttatagaaatgatgtgaaaacagaagagcgattcggatatatgtgggaatgcccggattactttacagtggatgacggaaaaattttatcggtttcagtacagggacttgacggtgggatctgggatacacgcaacgtttatcagtcaggttatttccggatagaaggggatctcctttcccaatataagctgtcggattatgaactttgggattatggatttgattattatgcaccgcagagctttgagagtgaggatggacgacggattcacatcagttggatgggaatgccggattgtgaagaatatacgaatctgacactggaggatggatggcagcattgttttacgtttccaagagaagtatcggtaaaagaaggaaaggtccttcagcagccaattcgagagctgaaccatctgagaaaaggaaaaatgcggacaaaatctactctggagaaaaagggaaagaaaacatttgaagtggaagtggagaacattgcagcgaatcagtttcgggcagttctggcaaacgaactgatcctggaatatgaaaacggaaggttcgagatgaagtttacgagtcaggacaaggcttctgtttcagcgggaagaagtatccgtttttgggaagtcagtgaaataaaaaatgtcaggattctggcagacgtctcttcagtggaagtgtttatcaatgatggagaagctgttttttctacaagatattatccaaaggaatatgaagtacaaattcaagctttggatgcagaaattacattttgggagttataattacaaaaatgttcctgacaggaaatcctgcaggaacatttttgcatataagaaagagtattcaatatacataaaaggtcaattggaatcttctttgtctcttggcagaatgatatttaacagaactgccataagagtagccacaacaaccggtgattttccgaaaatcatgacaaaccagtccgggaagctggcaagagaatcacttgcctgtgagattcccattccaagtgctgccgcaagtcccacgatggaagtattgcgaaacgtcatattctgtgatgtgatcagtttcattccggtcatggcgatggacgcgaaaacagacactgtggcaccgccgagtacacaatacggaattgtcgttaaaagagacgagaatttcggaatcactccggctatcaacagaatcaatgccgcaccgccgagtacacagcggttgataacttttgtcgttgcaacgatccccacgttctggctgtatgtagcagtcgggagtccgccaaggagagaaaacagaatattggagattccatatcctacgattcctccctgcagttcctgatctgttggcatacggttcattcctccgctggttgtggcggaaaagtcgccgattgcctgaatggagttgattgcaaacagcagaccgattgcgacacaggcggaaggttcgaagcgaattccgaaatgaagtgggcttggtacctggaagagggcagcatcatggatgggagaaaagtctaccattccgaagaacagtgcgatgatatatccaccgatgataccgatcagaatggatgccagtttccagattccttttccaaaatgattcaataccgttacaatagtcaatgtcaaaatagcgaccagccaattttgccaggaaccataatctttgctgcctacccctccggccatatagttaatggcagtcggatacagagaaagcccaattgtaaatacaacggttccagtgattagaggcgggaaaaatttgcggatcttccggataaaaagtcccacaaaaacagccacgataccacctgcgatcatagcccctaaaatggtggcaacatcatactcttcggcaatggactgcatactcggaacataggcaaagctgatgcccatgatgaccggaaggccggatccgattgtaagataccgggtcttgataaatggaaacagttgtaacaatgtggcaagtgcggaagtgaccaaggcagcctgaattaaaataacagagtcagtttccgaaagtccggctacaccggatacaatgatagcaggcgttacacagccgacgatcattgcgacaacatgctgcagtgcaagtggaaatgcctgattaagggcaggcactccgcttagttcaaaaatggtagagcgggttgtctgatgtttcataaataaggtgtccccctttattcgagatgaatccgggttcctgtaagcccctgaattccttctctggctttttctagtaatgtgatcaaagattgccttccgggtgcagattctgcaaattctacggccgcctgcatcttcggaagcatggagccgggagcaaaatgaccttctgcaatatactgttttgcttcagctactgtgatatcatccagccatgtctgttctggtgtcccgaaatgaatggctgctttttctatagcagtgaggatgatcagaacatctgcatccagttcttttgcgagaagcgcactggcaaaatctttgtctatgactgcactggcaccttttagatgattgccctgacgaatgaccggaattcctccgccgccacaggcaatgacaaggtcaccggagtccaccatcgtccggattgtgccgatttcaatgatctcctgtggttttggagaagctacgacacgacggtagcctcttccggcatcttctttcataatgtagtcatatttctgcgacatttcgtctgcctgttcttttgtaagaaaacgtccgatcggtttggacggacaggcaaaagctggatcatgttcatccacacgtacttgtgtgatcatagttgcgacaggaatatcggtgatattgcgatttaagagctcttcacggagagcattctgcagatcatagccgatataagcctggctcatggcaacacagacagaaagaggggtattgggctggtgtgcatcttcgtgagtcagggcgagcattgcgttgttgaccattcctacctgagggccatttccatgagcaatcacaacttcacatccttcctcgatcagatcaacgatggcgcgcgctgtgatcttgacagctgccatctgttccggaagggtgttgcccagggcgtttccgcccagggcgatgacaattcgtttcttccttgtcatatctattcctccctgattgatgcgattgtttctacctcacataaaactccttttggcagatcttttacagcaacgcaggatcgcgccggtttgcctgtaaaatattttgcatagatttcattgaatgcagcaaagtctttcatatctgcaaggaagcaggttgttttgacaacatctgtaaaatctacattctggctgttaagaagcgctttgatatttaacatgacctgttcggtctgttcctcgatcgtcgttccgacaacttctcctgtttctggagaaagtggaatctgaccggagaaaaatgcaagtccgctgcagatgattccctgagaataaggtccgatggctgcaggtgcatgtttggtttctacatattttagcatagcttagtccctcctgaatataatccatttcgcatctgtaatagtatagcaggttttattcaaaaactctaggtgtggatttttcttccagtttctttaagatatcagcaggatccgcaaattttgcaaggaagatcatagctgcgatgatatatggtttgtagctggcttctttgtataatggtgttctatagcggtcaaatacgctggcgtctacttctccggattcacagcttacaccggtaatgtctgcaggcagacagtgcaggtacaatgcgtttccgtctttggtagttttcatcagttcttcggtacaagcccagtctttgtgctctgcattttgtgcaagcagttctttttccagagcattgattccttcgaaatctccatttccatataattctgtacgtttttccatggcagcgaatggtgcccagctttttggataaacgatatctgcatctttgaatgcttccgccatattattggtcttagtgaaagagccaccggatttttttgcattttcagcagcgattgcttccacttccggaaatacttcgtagccttccggatgagccaggacaacatccattccaaaacgtgtcatcagaccgatcacaccctgtggaacggaaagtggttttccgtaggaaggagagtatgcccaggacatagcgatttttttgcctttcagattctcgacaccgccgaattcatgaatgatgtggagtatatcggccattgcctgtgtcggatggtcgatgtcgcactgcaggttgacaagtgttggtttttgctgaagaataccgtctttgtgaccttctgtaacagcgtcaacgacttcatgcatataagcgtttccttttccgatatacatgtcatcgcggattccgatgacatctgccataaaggagatcatgttggctgtttcccgtacggtctcgccgtgtgcgatctgagattttccttcgtccagatcctgtacctccagaccaaggagattacatgcagaagcaaaggaaaaacgggtacgtgtggaattgtcacggaacagagaaattccgagtccgctttcaaatacttttgtggagatgttgttctctctcataaaacggagtgcatctgccagtgtaaacaccgcttccagttcatcgtctgtcttttcccaggtcagaaaaaagtcagagttgtacatgtctttgaagttcagtgcatttaatttatcaatgtaatcctgtaatgttttcatagtgtgattcctccatatatgcaggcggggcctgttgatctgatttttggttttatgatttatttacaatataaagtcggcagtgcggcataaacagcggcacacacaacgaggtcggctttccatgtcttttcatttggtgcatgagcctgcgcctctgctccggggccgaatccgatacaagggataccgtttcgtcccataatagaaacaccgtttgtggagaatgtccatttgtccgtcagtggacgtgcttttcgcatctcgacagtttctgcagatccgattctttcttctccgtagagtcctttgtaggcttcttccagtgctttcgtaactttgtgatcttttggaatgacccaggtcgggaagtagcattcgattggatagaccagtccggtgtaggaaggtctgtcatagtgatacatggaaactgtaacgtcatcaccatatttttgtacacttggaagtgcacggatctcatccaggcagctctcccatgtctcgcctgcagtcatgcggcggtcaagggaaacagagcaggaatcggcaacagcacagcggcttggagaagtaaagaagatttcggatgctgtaacagtaccacggcctaagaatcgggcttcttcccattccggattgtatgcctcatccaacatcttaacgagacctttgatctcggttgcatcttcggcatcattttcattgagcgcacgtacatcctgcaggatatcagccattttgtagatggcattgtctccgcgttccggagcagagccatgacaggatacacctttgacatccacgcggatttccatacgtcctctttgtcctcggtagataccgccgtctgtcggttctgtggaaacgacaaattccgggcggacgtgatcttcattgatgatgtactgccagcaaagtccgtcacagtcttcttcctgaacagttcctgtgacaagaacggtgtattggtcacttaaaagccccagatctttcatgatctttgcaccgtaaaccgcagaaacaataccgccgagctgatcagaagtaccacggcctccgatttccgtgtcagattcaaatccttcataaggatcaaattcccagttgtcacggtttccgattccaactgtgtcgatgtgagcatcaaatccaatgagtgtttttccggttcccatatagccgagcacatttccctgcgggtcgatctcgactttgtcaaagttcagttttcgcatctcttcggcaattcgttcaatgtggtctttttccccgcagctttctcccggaaattttacaatctctctgagaaattttgtcatatctgcctcataattttttgcagcttctttgattttattgaaatccatgtgaaaatcctccttatataaaataaaacctatctgtcattgccatcccacacgatggactcgtagcgtgccggatctgtatctccttctgtggagaagagcagtacccgggaagttgcgtccagtcccagatgttcccgcaaatcctgatattcatccatgcacatgatgcatgccagagtaccaaatggtgcggcaccggattctccagatgttaccggggtatctcctttgatcggtgcggcaagcatgcgcattccttttgcagccacccagtccggtgcggcaacaaatgtgtctacatgattctttaaaatatcccaggagatcgtgtttggttctccgcaggcaagtccggccatgatcgttggcatatcaccatccacaatgcggatgtttccgtctccggcagcagcacctttgtagagacatgcagcagcttcggcttctacaacgacaacttttggcgggttctgcggataacggtttgcaaaatatccctgcacggcaccggcaagagatcccacaccggcctgaatgaatacatgggtcggggcttcgcatccatcttcatgaagctgttcgtcagcttccattgccatggttccatatccctgcatgatccatgcgggaatttcttcataaccgtcccaggcagtgtcctgtacgatgatgccgtgttctgtatttgcagccatctctgcagccatacgtacacattcatcataattgcattcttcgatggaagcagcagctccttctttgagaatattatttagccgcgtctgtgtacttccctttggcatcaggacaacagctttttgtcccagtttgtttgcagcccaggcaactccgcgtccatggtttccatcggttgcagtaaagaaggtggcctggccgaactcttttttgagcgcttcagaagtgaggatgttgtagggaagctcgctgacatctttccctgtctgctgtgcgatgtaacgtgccatggcaaaggatccgccaaggactttaaaagcattgagtccgaatcgataggattcatccttgatatagagggaaccaagtcctaatttttctgccatgtggtttagtcttaccagtggtgtgacgctgtactgtggaaaactttcgtgaaatgcacgggcttttctgacttcagaaagcgccataaccggaaggttggaatcttcggtttttggcatatgattgactgcccatttgattgtctccatgtgtaaaaacctccttattatctgctattttcctgcatccatataactgtaaagtgtaaatttagaaatgttgagaagatttgcaaccttatctccagatcgtgtgatcagaaatgcacctgcatcgtttaaataacgaaccacctgaatcttatcctctttggtcatcagagcaacgggtttgccgatcagtgagagtccctgctgcatcagatcctccagaagttcttctacattgcgggtgatggtctgtggttcgagcggttcacgtacggtacggatgccggattcctgttctgtgtgaagcagggattccagtgcgttgtttaccgtgagaagcgaggtaatgtcataattgatggaaaagatatacgatattttcccggctccatctcgtatgtaaagcgtactggactttagaatccttccgtcttcggtacgtgtgagataagacagcttatcttgtactctggcagtgtttttgtgtaaggtctccagaacaattccggaaggtccgtctccggatttgcgatgtgtcacctgtccattttcaatgtggacgatagaagtctcaaggtccttgttcagatcatgaatgaccacctcacaggaagtgccgaactgtgcagcaataccatgtgccatttgctttaaaagagtaagcgtattgtccatagtgaaacctcctttgtgaaaaaagtattggtaaaatctatcaaaaacaactgcttctaaattcataatatcataaaaattcataaaatcaatagtttttctaaaaaacttttagataacctaaaaaacttttagaacggatattgcatttgtgcagttttgatggtattctatagataacaaaagcggttctgggaaaaatatacaaaaatcagggctgcaaaacaggagatacaaaatatagtgcgacgtgcaaggactgtccttgtagaatttgtatacttttttagagttcctgttttttctggtgcgtgggggatgacgatgtcatagattcaggcaggaaaagagaaaacagcagcaaaaaattctcaaaaagaaaaggagaggttggtatgcttattttaggaaacggcaggatgatcacaagagatgcagacaatccatatctggagtgtggagcagtagcaattgacggaacaaagatcgtaaaggttggttcgctttcggatgtaaaggcagcgtatccggaagcagagttcgtagatgcaaagggacaggtgatcatgcctgcttttatcaatgcacacgaacatatttacagtgcgtttgcaagggggctgtcagtgcggggatatgatccaaaaggatttttggatattctggatggcatgtggtggaccattgatcgaaatctgacattgcatgatacatatttgagtgccatggctacttatattgattcgatcaaaaacggggtgacgactgtttttgatcatcatgcaagttttggctcgattcgaggttctctgtttgaaatcgaaaaagcagcaaaagagagcgggattcgatcttgtttatgctatgagatttcagaccgtgatggaaaagaaaaagcaagagattctgttatggaaaacgcagaatttctccggcatgtacaaaaagaaaatgacagtatgatcgcaggaatgatgggaatgcatgcacagtttaccatttcggatgaaactatggaactggcagcagcgaataaaccagaaggtgtgggatatcacattcatgtggcggaaggaatcgaagatttgcatcactgtctgaagcattatggaaaacggatcgtagatcgtctgatggattggggaatcctgggagagaagacgctgcttggtcattgtatttatatcaacggacatgagatggatctgatcaaggagacaggtaccatggtcgtacataatccggagtccaatatggggaatgcctgcggatgtccgccaacgatggaactggtacaccgtggaatcctgacaggacttggaacggatggatacacacacgacatgacagagtcgtataaagtggccaatgtgctgcataagcatcatttgtgcgatccaaatgctgcatggggagaagttccgaagatgttgtttgaaggcaatgtaaaaattgccgagcgttattttccgcagaaactcggagtattgaaagaaggggcagcggcagatgtgatcgttgtagattatgatccgctgacgccgatgaacggagacaatgcaaacagtcatattctgtttggcatgaccgggaaacaggtcgtaacaaccgtggcaaatggaaaaatcctgatgaaagacagggaacttctgcatattgatgaagcaaaagtaatggcagactgccggcaggcagcaaaagaactggcagatcgtatcaacgcataggaggggcgaaagatgagtgaagttatgacaccgatgtcatttgaacagttggtagactggatattgcaggaaaagaaaaaaagcggcactgtgtttggacagcatcgtgcttaccgcgcggacggaatgtatcatcgtacgatgttcggccgtgatctggagacaccgatcggaccggcggcaggaccacatacgcagatgacacagaacattgtggcagcatattatgccggcagccgtttctttgaattgaagacagtacaggttatggatggagaagagctggcagcatgcatcaaccgtccatgtatcaaggcggatgatgaaggctataactgtgaatggtctacggagctgacggtaccccaggcaatggaagaatatatcaaagcatggtttttgctgaaggtgatcgcaaaagaatttgacctgggagatatgaatggatttcagttcaatatcagtgtagggtatgatctggcggggattcagtctccgaaggtagacgcctttttaaatgcgatgaaagatgcagaacatacggagatcttccaacactgtaaggcatatttgctggagcatgcggattggtttgaacatgtaacaaaagaagagattgcgcagatctcaccggaaatctgcaattctgtgacattatctacacttcatggatgcccgccgcaggagatcgagcggattgcaatgtatttgctgacagaaaaaggattccatacctttgtaaaatgtaatccgacattgcttgggtatgaattcgcaaggaaaaccatggatgacatgggatatgattatgtacagtttggcgatttccatttcaaagatgatctgcagtatgaggatgcggtaccgatgctgaaacgattgatgcataccgcacaggagagaaatctggaatttggcgtgaagatcaccaatacgttcccggtggatgtcaagcaaaatgaacttccaagtgaagaaatgtatatgtcaggaaaggcattgtatccgttgtctatttctctggcagcaaaactgaccagagaatttgacggaaaactgcggatttcttattccggaggggcagactactataatatagaaagaattgttgatgcagggatctggccggtgactgtggcaacgacactgctgaagccgggaggataccagagactgactcagatggcggagcttcttcacaaagaaagtgctccatttgagcgagtagatgtggaaaaagcaggaaaacttgcagaagatgcagtaaaagatccacatcatttgaaagcaatgaagcctctgccgtcaagaaagatgaagaaagaagtgccgcttctggattgttttgccgctccatgtaaagaagggtgcccgatccaccaggatatcacaacgtatttacagctggtaaaagaggaaaaatacgaagaagcaatggaagtgatcacagagaaaaatccgcttccttttatcacgggaaccatctgtgcacataattgtatgagcaaatgtaccagaaacttttacgagacacctgttcacatccgggagatgaaactgcaggcagcgacacacgggtatgaggcgctgctggaaaaacttccggttcctgctgttaccaagacgggcaaagcagcagtgatcggaggcggtccggcaggtatggcagcagcatacttcctgcgcaaaggtggtatggaagtgacaatattcgaagcaaaagagacactgggtggtgtagtccgtcacgtgatcccgccgtttcgtatttccgaggatgcaattgaaaaagatgttgacatcttaaggaaaatgcaggtggagattcgctgcagtacaacagtagagtctttggaggaactcagacagcagggatatacgaaaatcgttttggcagtgggcgctccggtgcagggaagcctgaaattagaggcaggagaaccgaagaatgctttggaatttttggaagagtttaagcagaccggtggaaaggcagaacttggcagaaatgtggttgtgatcggcggtggaaatacagcaatggatactgcaagagctgcgaagcgaaatgcaggagtggagcatgtatatctggtatatcgaagaacaagacgatatatgccggcagatgaagaagagctgatcatggcattggaagatggtgtggagtttaaggaattgctttctccggtgaaattggaacatggacagctgctctgcaaagtgatgaagctttccgattatgatgcatccggaagaagaggcgtgtctgagaccggtgagacagttctgatcccggcagatactctgatcgcggcagtcggagaaaaggtaccgacagactggtatcaggcaaatgggcttcaggtttctgagaaagggaaactctatgtggatgagaaaacacttcagaccagtcaggaagatgtgtatgcagcaggagatggcctgtatggaccggcaactgtggtagaggcaatccgggacggacgaaaagcagcagaagcaatcacaggagaatcactggcacgtgattttgatcgtcctgcagaggaagaaaaagtatatgcaaaacgaggaatcttaaaagaggaacaggaagagtccaaagaggcagaacgatgtcttggatgttctgcaatctgtgaaaattgtgtggaagtctgtccaaaccgtgccaatatcacgattcggatacctggtatggaaaaacatcagatcatccatgtggattatttatgtaatgagtgcggaaactgtaagagtttctgtccgtattccagtgcgccgtacctggataaatttacattgtttgcaacggaagcagatctggagaacagtaagaatcagggatttgcagtattaaattcagaaacaggacagtgtaaagtgcggttttttggaaagacattcttatgggagccggatgcaccatcagaccttccggaaggcctgggtcgtgtgattgaaacagtgtgtcgtgagtatccatatctgttgagatgaaatcaaaggttgcaagttggataagagttcggtaaagtgaagggggctgctgtgaaagaagcccccaaaaataaaaaaagagacagcaggcagcatggaaaaaatatggagatggaagaacggaatactgcagaaacagaactctcttttagagggactgcagattacggaaaaagaagtgatttctgtggtcggtgcaggcggaaagacaacgacgatccgcaggttggcggatgaaatggaaaaaaggcagaaaagggtggcggtgactacgaccactcggatgaagaaagaagcgcagtttttacttgcagcagattttgagagaattacacagcaatggaagaagagcagtcaggtttggtttgcggaacaagacgagcatccgcaaaaggtcaaaggagtttccgaagaggttctggatcaggtgagaaaagctcctttggatctgatcctgatcgaagcagacggagccagagagcttccctgtaaagtaccggagacatgggaaccggtaatctatccaaaaagtacaagagtgctggcagtttatggattggatgccgtgggagaacgatttctggatgtttgttttcggccggagctggcagcagagattttgaagaagaatatagcagaccggatatctgcgcaggatcttgcgcggcttgccctggatgtaaggggagggaaaaaaggcgtcaaagaacatatgcggtatcaggtcattttgaataaagcagatacacagcagagaaaaaaggcagcagaggaaatctgcagggaactggaaaaatcgggattcacagatgtgacagtgacagcagaaggaaggcaggaagaaacatgaaaattgtgatcaaaggggcaggagatctggcaacagggattgcctctcgtttatatcatgcaggacatcagattattatgacagagattgcggttccgctgacggtaaggagaaccgtggctctctccagagcagtctatgaacatacggcagaagtggaagacttaaaaggtgtgttggcgaaagatgaaaaagaggcggaatggatcttacaaagaggagagattccggtgatgatcgacccggaagcggagattatccagacatttcatccagatgtcgtagtcgatgcgatcctggcaaagaagaatctggggacaaggatcacagatgcaccatttgtaattggtgtaggaccgggattttatgcaggaaaagactgtcactgtgtcattgaaacgaaaagagggcacacattgggcagcgtaatctgggaaaaggaagcaattgccaacaccgggattcctggaaatgtgggaggatttacaacagagcgtctgatccgtgccagtgcaccgggagtgatgaaacctgtggcggcaatcggagagactgtagaaaaagggcagattgttgcatatacagggggaaaaccagtgtatgcaaaaatgagcggaatcgtccggggaatgctgcagccggaggtgctggttacagaaggtctgaaaatcggtgatattgacgcgcgatgtgaacaggaacactgcatcacgatctcagataaggcacgagctgtcggagggggtgtactggaagcagtgtctttatttgaccagatttatggaaaatatgcagtggcgcttctcgcagcaggagaagcaaaacggttcggaggagacaaattagcggaagttgtacaggggatgccgttatatcagcatgcactaaagaagctgaaggcgttttcagggcttttgcgggttgttgtgacggcacgagaggcattgtcggaagaggcacaaagagcagggattgatgttgcagaaaacagacagccggagcttggaatttcgcattctgttattttggcagtgcagacattgcttttgaaacatccggatctggaggggatcttgtttctcgtctgtgatcagccggggatccaggtgtcgacgattcagagaattttaaaagagggatgccttcataaaaacagcattgtgtgtgccggatatgatggaaagcgcggcaatccggtactgtggggaaagaagtattttccggagcttttacgtctgacaggagatgtgggcggcagacaggtgatgaaacaatatgaaacaaacatccggatcatagagtgtgcaccggaagaattaaaagatattgacaggagagaagatatgacagaatagaagggaaatatcccgaaaggaggtttttcatatgctgatggttcatgtaaatggaaaagattatgaagtagagaaggatacgaaactgatgcgctttttgcgcgacgaactgaagcttacttctgtaaaggatggatgcagtcagggggcatgcggaacttgcactgtactgatcgacggaaaagcaacacgggcatgcatccccatgctttccaaattgcaggggaaatcgatagttaccgtagaaggaatgagtgagcgggaaaaagacgtctatgcttatgcatttgcaaaagtgggggcagtgcagtgtggattttgtattcctggaatggtgatgtgtgcaaagggacttctggatcaaaatccggatccaagtcgtgtggaagtagcagcagcgatccggaataatatctgtcgttgtacgggatacaaaaagatcatggaggctattttacttgctgcaaagatgtttcgggaaaatcttcctacagaggacgtcagtggagtggtatcggtcggagacccgatcctgcgtgtagacgcaagggaaaaagtgcttggaaccgggcagtatccggatgatgtatatctggatgatatgatctatgccagtgcagtacgtgcggaatatccaagagcgagagtgttggcaatccacccggaaaaggcgttggaactggaaggtgtgatcggtgtatatacagcagaggatattccggggtctgtaaaagtaggacacttaaaaccggattgggatacgatgattccggtaggacatgtgacacattatattggagatgcagtctgcctgatcgctgcagaatctcaggagattctggagaaggcaaaggcactggtagaggtggagtatgaggtgctgccttcggtactggatccatttgaggcattaaaagaggatgcgcccaggattcatccggaaattcagccggatggcaatgtacttgcccatgaacatctggtcagaggaaatgcagatgaagtgattgccaattccagatttcaagtaaccagacattatgaaactccgtggacagaacatgcttttctggaaccggaatgtgcagtggcgatgccgtttgatgatggggtatttctctattcttccgatcagggaacttatgatacccagcatgagtgcagcatgatgcttgggcttccgccggaaaaggtgatcgtggaaaataagctggtaggcggtggatttggaggaaaagaggatgtcagcgtgcagcatcacgcagcattggtggcatatcttaccaaacgtccggtaaaggtgaaattatccagacaggaaagtatcacggttcatccaaaacgtcatccgatgtggatggatattaccacggcatgtgatgaaaatggatatctgacagcaatgaaagctgtggtagtggcagatacaggtgcttatgcatctctgggcggaccggttctgcaaagagcctgtacacatgcagcgggaccgtataatttccagaccattgatattgacggaaaagcagtgtataccaataatccgccggcaggcgcatttcgtggctttggggtgacacagacttgttttggatcggaacgaaatttagatctgttagcagagatggtgggaatctctccatgggaaatccgataccgcaatgcaatccgtccgggacaggtacttccaaatggacagattgcggatgaatccacaggaattgcagaaactctggaagcggtcagagagatttatgaacaggctccgtatgcgggaattgcctgtgcgatgaaaaatgccggtgtaggagtaggacttccagactggggcagatgccgcctgcttgtacaggatggaaaggtacagatccatgcaggcgcttcttgcatcgggcagggactgggaacagtgctgactcaggtggtgtcacagacagcacagattccggtagagcagattttctattgcccggcgaatacttccaattctccggactccggaacgacttccggttccagacagacattgatcaccggagaggctgccagacgcgcatgtgagaagttatatgaggatttgaaagaacattctctgaaggaactggaaggaaaggaatattatggagaatatcttgccaaaacggacaagatgggaagtgatgttcccaatccggtatctcatgtggcatatgggtatgcaactcaggtctgtatcttgaatgaagatggtacgatccggaaaatggtggctgcgcatgatgttggaaaagccgtgaatccaatcagtgtggaaggtcagattgaaggcggtgttgtcatgggaatgggatatgcattgacagaacagtatgagatcaaggaaggaagaccggtttcccgatttggaacactgggattattccgggcggacaaggtgccggatattcagccattgatcattgaaaaaccggggatcaggcagggatatggagcaattggaatcggagagatcacatccattccgactgctccggcgattacaggtgcctattataaactgacaggtgagttccagacgaagctgcctttgcatggaacgccttacgaaaagaaaaagaaataagagccagagaaaaagctcctaagggggcttttctctggcagatcaagttgtttttaaaaataacttgatgtataataaaagaaaaatatgcaggaggatgtatgatatgaagcgaagaaaaatgtggagtattcttgccttgacagcattgacaggttccctgttagtgggatgccaggaagcaaaaacagaagaacagacaaaagaaacaaatcaggaagaaaagccggtagaactgctgatcgctgcggcagcaagtctggaatattcttatgaggaagagctgattccgatgtttgaaaaggagaatccggatatcactgtaaaaggcacctatgacagctccggaaaattacagacacagattgaagaaggaattgcagccgatgtttttatgtcagcggcaaccaaacagatgcgtgcactttcggagcagggactggtcgaaaccgattctgtggtggatcttcttcagaatcagatcgtattgatcactgccgcagattcagatctggatttgcaggaatttgcagatatcacaaaagcggatgtgatcgcaatcggggatccagaaagcgttccggtggggcagtattccaaagaagtgctgacgaatcttggaatctgggacagtgtgtcggcgaaagccagtcttggaacgaatgtgacagaagttttgaaatgggtagaagaaggaagcgcagatgcgggaatcgtgtatgcaacagatgcagcaacaacggatcaggtaaaagtagcagcagaggcaccgaagggaagtatgacagaaccggcaatctatccggttggagtagtgagtgcatctgagaacaaaaaggcagcagagaaatttgtagagtttttacagtctgaagaggctttgaaagtgtttgaatcttatggatttcaaagaaatgagaacgaataaggaagaatcactttctactgcataggaaaggagtacatatggaaatttcaccgatcatcgtctcgatgaaaacagcgtctgtttcgattgtgatcaccttttttcttgggctggcagcagcgtatgcagtggagcggatccgcagtgggaaagtgcagatgatctgtgacgggattctcacactcccgttggtactgcctcctactgtggcaggctttttcctcttatatatatttggtgtcaagcgcccggtgggcagattttttctggaatatttcgggaccaagattgcattttcctggcaggcaacggtcctggcggcagtggcgatctcatttccgctgatgtatcgttccgcacggggagctttgcagcaggtagatgggaatctgctttatgcagggcgtactctgggaatgacggaatgggatttgttttggaaagtatggtttcccaatgcgatgtccgggattctgtccggtggaattttggcatttgcaagaggtctgggagaatttggggcgactgctatgattgcaggaaacatagccggagagacaagaacccttccgctggcggtctattctgctgtggcagcaggaaatatggatgaggcataccgctatgtggggattctggtggttatttcgtttttagtagtaaccgggatgaatgcagttacacgcggattccaaaaatataatcggaggcagcaaggatgatggaaggactgaaagcagagttttcaaaacaactgaaaaaattccctttgcagatcgaatttacggctgaaggcggatgcattggaattctgggggcttccggatgtgggaaaagtatgacattaaaggcgattgcaggaatcgagattccggatatggggaacatccaatccggaggaagagtgctgtttgacagtgaaaatcagatcaatcttccgccaagaaaacgcagggtcggatatttgtttcagaactatgccttgttccccaatatgacagtgcttcagaatattgaggcggggatccgggaaaagaaagcggaaaaaagaaatctggcaatggagatgattgagaaatttcatctgcttgggctggaaaaaagcaatccgtctcatctttcaggagggcagcagcaaagagtggcacttgcaagaattcttgcttcaaagccggagatcctgcttttggatgaacctttttcagcgttggacagttatctgaaagaagaattgcagtttgagctgcaggaacatcttcgggagtttggcggaacaacgatcatcgtaagtcatgaccgggatgagatttacaaactgtgtgaccggacgatggtgatggggcagggaaaaatcctgatagaaaaagatacaaaaaagttgtttcaaaagccggagcgagtgatggcagcaagactgaccggctgcaaaaatatttccagagcaaaaaaaacgggaacatatcaggtgtatgcctcggattggggaatggaactaaaggtggacactcctgtgtcagagaacatcactcatgtagggatcagagcgcatgattttgtaccggcagacgggacaaaatctggaggcgtgaaccggattccagttgcagtcagtcgccaggtgcgcgcaccatttgaatggacgatcttatttcaaaacaggaacaatccaaaagagtgtatgtggatgaagacagagcgtgaacagagtcagattccgcagtatgtatcggtagatccaaaatgtgtgttattattggaagaataggaggcagagttatgtttcgcccaatcttaaaaattaaaatatatcaggacgatcttgtatttgggccggggctggtcattctgttggaatatcttctgaaaacggaatccatgaaggatgcctgcagtgaaatgggcatgtcttatagtaaaggatggaagataataaaccgtgcagaaaaagaactgggatatgaattgctggatcgcagacacggaggaaagagcggaggaaaatgtacggttacgcaaaaaggacagtctctgatgaagcgataccgtcagatggaagaagaaacgaaagcaaatctgcaaaagagttttgaaaagtattttccggaatatcggtaaatgcggtagattttccccatattcagacgtataatagaaaacagatgaaatgacgggacagaattggaggaaaaaagatgccgaattggacaagagaacaattaaaaaataatgcgaagatgaatttttataaaaactactggatgtgtgttgccatagcgctggttttgacgattgtgctgatgatggagccggatggagtgaaagaagagattgtggtgaaggtcagagagtatacaaatgtgtttccggcttatggtcatcatggatggtttgcgggattatttgacggagtcggttactggctgggaatgctgtggtctgtttttaccgtatttctggcatgggggcttttgctgctcaaagttttcgcaggcaatgtgatatatgtaggaggcattcgattttttattcagaatagaacggagaatccgtcggcgggaacggtcttctttggatttcagaatggcagctatggaaacattgtgcttaccatttttttgaaaaatctgtacaccgctctctggacattgttattgatcgtacctgggatcatcaagcactatgagtatcggatgatcccgtatattctggcagagaacccgaccatgaacagacaggaagcatttcagatcagccgctgtatgatgatgggacagaagttggatgtatttgtgttagatctttcttttatcggctggtttattctggaaaagatctcgttcggtctggcaggagtgttcttcgtacgtccttactatgaaagtgtatttgccgagttatatgaagcaaataagcagaaagcatataaagaaggttatatccggtaacaggaaaaggggctgcatcaggagtgtctcctgtgcagccttgagaaaagggaaaatttatctaaaaattaggtaatgtctgattaaaatatttaggcgaagtccgatggccacagctgctctgcaagtgcagccatcgtcttctttcatattgatgtatatagaatagcaatgaattgtgaatgaggtgtgacaagaagtaaaaaaatatcttaattaaatataacgaaagtataaattggaacttataaattttttagaattaagaagtctggttgacaagatgcattgtgtcttttgaaacagagctccagaaatcccgccgggcttcatattgctccaaaagccagtctatggcagcatccatcccctcttccgtcatgggaaaggtattctgtgttttctggtcgtccggcgttttcgaaaaagaccatggctccggataaacaaagaccagaaaattttcttttgtgtcatctgcacagaaataatagcgcattccaaagtgagaacctgaaaaaggttctttttttaatcctttgacagggatgagttttttatcgatcatgtgatagcctcctggatattttatatatatagagtagcattgcgttcaaaaagatgcaagataaaggggacttgcaattataaactgaatggtctataatgttgatagttcgcataatttcaaaaacgaagattcggattgatcttctgcatggaaaaagagccacatatcaaatgtgactcaaaaggggaaaaagtttatgaaaaagtgttctgttctttggaacaactatagtatagaaagaaattgtgtaaaaaatgtgatataaatttgaagggaatgttaataaattaagaattattaaaaattgaagaaaggaaagattggcgtgatgaaggttttcagaaagattatagattccattttttggatcatcgcaattgtactcgttgtgctcttgttgcttttgggaggggtgagacttttcggatatgtaccatacattattaccagtggaagtatggatcccgtctatcctgtaggaagtgtcgtgtataccgagaaagtagaatttgagcagcttgaggttggcgatgatatcagtttttacatagatgaaagcacagtggcgacacaccggatccgtgagattatacaggatgaggaaaaagtgcaaacgtatggcgtcaataatatagatgcggatggaaatcagatcaacgatgctcaagccgttgattttgatcatatagtcggaagggtgaggttttcacttccgatggtgggatatgtgtacagggtgatagggacaagttctggaaaggcaggtgtgatgatagttattcttgccttgttcacaatttcacgaattctacaatatttagaggagaaaagatcatgagagaaaacaaaagaaacaacaaattaaaaatgacagccgtgattgcagtgatgcttgtttgcatcctggcaattggcggaacaattgcttatctgacaagtcacagtaggttagcgaacacatttacagttggagagattgctccgattgacccggatggaagcggaccggatgggaatgaaaatattgacaaagatgataccaagctccagggaaatctctatgagccacattgggtagatgattcgaagttattcccgacagcagtcattccaaaagacccatatgtgggagttggaaaaggcagtgaatcctgtgccgtatatgtgtatgtgacaaatgagatggcaaataatcatcatatttattttgaaaaagaagaaggatggaaccctgttgcaggctgtgtatatgaagtaactgtaggcgataagacatattacgaaggcggactgtttgagtacacagcaggtctggacggttcaaaagcaacaggaaatgtctggacaacaacacctttatttaagaatgtgatcatttctgacgaagcagatgcagatgattttaaattaaaagaaggaatcacaacaggtggaaaaccaacgatcacagttcattcatacctgcatcagaaacaggatgctaatggagcagacattgagaaaacaaccattgaaaatgcagcaaaagcaaaatttggaattaactaattattgaagataaaatgaaagcagtaggaggagaagttatgaggaatatgaaagaaaggatgacaatatgttgtatcgttttactgtttctttgtatgcttttctctactgcgtttttgtcaggcggaggaaaggccgagaacatattgacgtttggccgactccgtctgcagttgataaaccataccgtgaatgaagacggtcaggaagtggccgtaaccgaggaaaatgaaaaattgaatgggacaaaggtatcccgtatcataaaaataaagaatatatgtgaacacccgatgtatgttcgggtaaggattgattttaaaggggaagatgatcaaaaaccattttcagcagaagagtatgtgtcttttaacagtccgaatgcaaaatggagccaaaaagaagaatggttctatttttcagattctttggagcctggatgtgagacagataaccttcttacggaattgacgtttgatttagatagattgatgactgaccatgcgggaagcaacattacttttacagtatatgcgcaggcagttcaaagtgagcataatggatatacagcagaaatggcaaaaggatggcctcaggaggcgggagaatgagagagaaacacatacaaaaacacagaataaaaaaagggctgaagtatgttttcacaacactgtgtctggctatactgtgtgcagttgctatgccggcagagcagggaatggcagcagacggagagcaaatcagagtaatccataagtttgaggatttcttcatttttgcacaggcaagtcagagctatgattatgaaggggtaacagtgcagttggctgatgacatcgaccttacacagcaggccgtaaaagacatgttggagaagtacaatgtacagcatctgacagtcggaacaaaagagcgtccatttaaaggaacatttgatggacagaatcattacatcaaagggcttgtgtatgaaccgggaatcataaaagatccgaacagcggcttattttcatttacggaaaatgcaacgatcaaaaaccttacctttgagaatgcagatattgaaagtgtttatcagggaggtattgtggtcggtcatgccaagaacacacggcttgaaaatctgacagttgtgaatagtaaaattaaaatatctccggcgaataatattgtttctctgatcaccaatcttggattttgcggtggtggaatcgcaggaattatggaagacagtgtgatgtacaactgtgagatcagcgggacagaagtagtgaataacagtactgcaggtgttaccggagttggcggtgaaggtttgtacatgggaggtcttgtcggatgggcagaggattctacgattgaatattcccgagtacgctccaattatgttggagaatccggctctcaggtggttaaagagagtaagatcagaaaccaatatgatatagcagtgggcgctcttggtggtaagagtctctatgccggcggtattgcaggtggtgtcaatacggatgacggtgaaacaaagatcatcgattgtttttctacagcagatgtctatttctacgcggcgaattatgtggcggttggttccggtatcgccggatacggcggtgggatcaccggtgctttacgaggcaattctcacattgaaagatgtcactatgcgggaaatattcactcgaaacaatacaatgcaattcttgtcattccgattatccaaaatgatgtgaatatcagtggattatccaatataaatggaggatcttccagtgtaaacgacagttattttaaaagaagcagcagtaaaactacgaaaagtctgaaagcggtcggaacagaaaatgatacggaacaatattcagctcagacggatcagacttatgtagatatcgacttctggaaagctcatggttatgattttttaggagatatagaaagaacatctaaatattctgaaagccatgtgaataagtgggttatggactatgatttgggaatcccggttcacggaagcagtgtctatgcttcttttgattttccaggagcaggagaagtgtctattgatgagactgctcttgtgaataccggtgtttcgacatcggatccgtatcagtttgctgcacagggaatacatccaagaggagatcagcaggtgactgtgcgtgtgaagccaacagacagtgacccggatgacgagattgatgaatatcagtttaacggatggttccgaaaggaaaaggtggagcaggattatgtgtcggatattgcagaactagaggcgattacgcatgcagaaggggctgcgccggacagcaaagatcttgattatacgattgaatataaagataacgaagtggatcgcaggctgtataccgcgtgtttgaaagcaagggtggcattttatgacataggcggtacagaaataagcgctaagacagactactatacttaccgtcaactgcttccggaagtagttcctgaggagataccggaaggggctgctttctatggttggaccacggtgccgaatgaaaatggaggcggctatccggcgattacttccgtagaattagagaaacttcagaaagaaggtgcagtttaccaggcaggagatcctgtagaaaagtcgatgaagctgtacccgatttttacaagctatattacgaatatcaaaacgatctttgagggacatgatccggagttggaaacagttcgtacaggtgttggacatacaacggtatctgcagacgaacaaggcgtatatatagaagcaatcggtgaggcagaaaacggcgctttcccggaagggtatcaattccttggatggtacgagcagatacaggaaggtgagacgctgtcagaatacagggtttctgctgaaaccaagtactatgttccggatgtttcgaaagaatctacttatattgcaagatttctatatgaagtcaaatgttatgcaagccaaaaagatcataagaatgagaataatgaatatgattattggaatttttatacagattgggtgaaatatgatcatatatttgatggagagtatctggcggagttgatgccggtggatcatgatcataacttcaatcactggtctcttgaaagaaatggaattggtgaatgtggaaataaatcagatgccattccggagggatatacgattgtaaaaccgatagaagtgtttggacattggacaggatcttcaacttggcaggttgcgctttatagtgatttcccaaatgcggcagcactgaccatggagagttatctggaatatgaccttacctttcaggcagagccaaaaccggggtatcagttcctgttttgggccgaagagagggaaaaaggtataaacaacgtttggacttcaaatgaaagcagatggaagagtggaacgcacttatctacagaaaaatatcgtgttgaggcacatctggcagcagaagtaaacttccatgataagacagatgcaatgacagatttgccagataccaaaacagttcttcgaagatatcaggatccggtatttttggcggaaaatagtgtatatatggattatacctatccattttccaaggagaagattacagtagagtatgcaaaagtagagagagcggcttcgccttctctggatgagatgcaggtgagggattcagataagaatgtggatgaacactatgaatttttaggctggatcaaggctcgtaatccacaggggcatgaaaaagatggaattgagatcggaggaaaagaatggaatgcactttacgatgtagagggggatcagtactgtacatcgaatgcaagtaaggcgatcccctatctgttagatgagaatgaagttgtgggagagactatggatctgtatccggtatatgtgaaatatgatgtgactacaacgacgaatatccatgagatgcaaacgttgcctgaaggaatacaatatccatcaaagccggcatattctctgaagcaggatgaaagtacaggtcaaaaaggtgtggcagaagttacgattactgcacttacaaaaacagaaacggtcagggagaatgaagagacaacctatgatctcgttggtatgaagtgcatacagggggatggtacagttgtcgatctgtggccggatgcaatactggatgaatcaggaacttcttatacatttaaaatgaagattgatggtggaatgccgtatatatttgaggcaatttataacccggcgtttgttgtatatcatctggatggagaaaattcgcctgacagtacgaaactggaaaccagaaatgtaggacagcaggtgggacatctggcgacggtaaattacgataagattgttcagccggagttgaaaaatagttatatgatcgggtggacagaacaaaaaccacttgaggataaaggatggtatcattattatgcgtccagaaatgagcttgaatcggcaaacgttccattcgtaacttcgaaaacgattgtccagaattctatggatctttggcctgtattttgcggaatatcagcagtggcagagagtaatattgatactgtgattcaggcaaacggggatgacccgggtactgtgcggtttatcgcagcagaggcgaatacattttctttgactgcaaaggaatatccgggctatgcatttaaaggatggtataaaaattatcagtcaaatgaaaacaaaggggatctcctgacagaatcaagagagtatgtgctgacagaaaaagagcttctttcacaagagaagaacgtgtttactgcagtctattcagacgcattagacattcgctatcatgattttgacggaaatattatttacacagcgaaaacaacggctgatgaaaagagaacctttgtacagccagatccaaacgatgataaaaaaatggttccgatcgatatagaagcgtttgaactgattttggaaaaagtcagaaacatggaagcagaaagcgggacagatatagaatttatagagtggcgctgcattgacggggaaaatcaaagctatatcagttgggatgaattcaaagatcagacgataacaaattccatggacctatatccggtcgcttatgaagtgggattttatgatccggaggatcaaccatatgatgggatctattatactgttcaaaagaccgaaaaaggtgaaaaagagatcaatgcattgtttacaaaggaatattcgcatccaacactgaaaattgcggcaaaagaattgatctgggatccatttgccgcagaacggaagagtatcggaatcgctgatatccggacaagtgtatatatgtcaggagagccggatgaacaaggtgcacctacatatgtaagcgccagcgagggaactgtgttgaccgatgaaaacggggaagcagttcacaatctgtttggcagactgattattcgtaagacatatggtccgttgaaaatggatggagttgtagtggtttgcgtagaaaaattagatgatgcaggaagtccgacaggacaagtattaaaagttccgatttctgtgaaagatggaaagggagaagtattgatgaaactcccgataggaaactaccgggtttgtgaagatatgggatggtcatggagagatgcgattgcaggcgtaacatggaacggacaggaaatgaccggattcgatctcgcaggaactacagatgttccgatcaatgttttgcaatctcaagtaatcgtatatggaaacacacgagagaatcagaaatggtttactgatttttgtgagaagaaaaatgtgtttggtaaagggatgccggcaggaggaaacatacaatgacaggagcaaaaaaacaacggagaaaaaagaaattacggtttcaggaatctatgggaattactgtttttgtgattttggtattactttgcgctttcattgcaggaaccgttgcttatctccaaagagaagcaaagctggtcaatgtgttttcggcgggaaatgtgaaagtagaggttgaggaaacctttgagaatgatgtgaagaaagatgtatccctgaaaaacagcggttcgctggatgcctatctgcgggcagaagtgctgatgtactacgaagatgagcagggcagtgtagttggtgcggtaccggttgaaaatatagattacagtattgtctggggggacaccgtatcaaatgactggatcaagagtccatccggatattactattataaaaatccggttccgggtggaaaaaacacaagtgttttaatccgggaatgtaaaccaatcgaaaatgcaaatatccacaccgacaaccatctggtggtcaatattctgacagaggccattcaggcaggttctgcccagccgatacaagaggcctggggaaatgatgtagaagtacagcaggatggtactttgaaagcgaaagacacggcgggaggaggagcggcagaatgaaaaaaggcttattgaaaacaaaaagcgctcttctgaaaaggaaattgcgaaaagtgagtttgtttatcacagtactcctttgtgccctgtgtgttcctggtgaagttgctttcgcttcttcaccggaaatcgtgtatgatggaaaatcgcagaaggttacatttgaacatgtgaatcagacggatctgtttgagaatatgaaaaatatgatgccgggagatgaacggtcacagaagataatactgcgggcaaaaaatattcatcgtgagacgagcttttatttacgggcacagtgtgatgaacagacaaaggaagtgctgaaggatctgacaatggatctgtattgtaatggtaagcttcttatggaaaattgctttgtgtttgaagatgtgaagcttggcagggtaacgcagaaagatgaactggaattagaggcggtgctgaatgttccgctatccttgggaaacgaagcagcagggcaaacatatcagattgactggtattttgttgcacaggaagatggagaagaggtcattgagacagagtttccggaagcgggacaatcaacaggaaccgttttgacaggtgattctttggcagaagatgtgatcgatgtcgtttgcttactgcttgtttcgggttgtttatttttatatttttatagaagacgatataaaaaaggttgaatgaggagcggatgctcctcattttgtataatattcacagtgtcaaggcagggcgatacgaagtttctaatttgcggcagtttctgcaaaatcagttgtgaccagtttttcataaggcgcgcgggattttaattcgcctgcactttccagaatatcctgaagcagttcaaaactgtcacgttcaaaaatcaggttttctttccaggaatcctgttcataatatcgggatacaatggtggtgatggtagaaagatctgtttccgggaattgaggtgcaatgacgcgggcgatttcttgtggtgtgtgcgtctgtacatagtccattcctttctgcagagcatttacaaatccctggatggtatccgggtgctcatggatataacttttccgtgcactaaatgcggtgtatgggacgtatccgctgtcggttccgagagatgcgacgacgtacccctttttaccggtttccagcgaagtggctcccggttcgaattctacggtatagtcagcctgcccttctgaaaaggctgctgcagtggaaccaaaatcaatattttgaacgattgtcaagtctttttgaggatcaatgttatgctgtttgagaatatattcaaaaaccatttccggcataccaccttttcggccgccaagcacagtacttcctttcaaatctgtccatttaaagtctggcatttcttctctggcaacaagaaaattaccggcgcgctgagtgagctgtgcaaaatttacaacaaaatcagaagccccttcgttgtaagtataaatagaagcttctgagcccataaagccgatatctgcctcaccggacagtacagccgtcatggttttatcggctccaaatcctgtatgaagtcggagatcgattccttcctggagaaaatagcctttttccattgcaacatacataggggcgtaaaaaatagagtgtgcgacttcatttaaagtaagtctggtaagttctttttttgaagaatttgagttggctggaaccgaatctggtgaagaactgcatcccacgagcagaattgtggatgcagcaagacaaagtgatagaattctttttttcataagcactccatagtttgaaagctgttactaaaagtatatgccggaaaaaaagaagcgtgaaaaaccggtctgaatcagatcagaccggcataaaatatcaatttgaaattagtaattatcgtgatcatcttcaaatggatcgtcataatcatcgaattcttcgtcttcttcctctgtatcgcgtctggacaggatcgtcaggatcaggaagatcacagcaagtgccgcgcatacaatcgcactgtacaagagcatcttgtcatcgccacgtttgagaaatccaatcacaccgcatccgagataaaagagtgttggaagcaggaatgcgacaatggtattgctcttctgtaaaatgagaagaagcagtccggagatcaacatgcaaagagccatgatgacataaaaagtaccaatgttggaattgcttccagatgtgatgctgtccaatccgctgatgacacctttataagtaaagaaaccgaaagcgatgatagaaagaattccgaagattacacgaagaacacggaatcttggcacgatgtaatcatcttcatagtcatcatcatcttcaagctcttcaggctcttccactggcttggaagcaggcttacgtttatgtacagattttctgtcaggatcagatgccagcatatcttcatagctcttttttacagcacgttcccgcttcgcacgtactttttcaggaggaatattaccataacgttgttcttcctcagcctctttctttaattcttccggtacagaaatcactcttgtttttgaatctgtggaaaccgggcgttttttcttaggaacactgttaacgtcagaagcttcagcgaccgggcgcttttttcttggggtatcgtctgtatgttcagaggatggacgcttcttttttggtttctgaggattttcagaaacagaaacttcggaaaccgggcgtttctttttctgagaaggttgttttttctcttgtactttttcagtgtgtgtttctgctttttcctgtgttggagccgaaattatgtgttctggctcagaaactggtgttttttcagcggccttttttgcacgctgtttgtcaagattccactgttttttacaatctttacagattgcgtattcatttaaaacaggattgccattgtcgtcaacccctacctgtttcttttgtaaaatgacatcctttccacattttgggcatttcattatttatatctctcctttgtatcacttattgtgacttgttttacctacaataagcacattataacattttgtttggcgaagaacaacgttttttgtcaaattattgaggaacggagagattctgattttgctatggttttggtttcacaagtggtgtctgatactggtaaatgtcattgtaggcttccagttcttcttcggattcaggaagcgaaggaatcaatcctgtacagtctgtagaagatgctgcatttttcagatagtcataatgatcgatcagttcctgattttttttcagttcgttttgtttcttttttttcaaaattatcacctcgaatttagtgtttccatgctgaaaaattgtattcatgataaaatatggtatactgaataaaaaatcaaaagaaatggagtgaataaatcatgagattgatcgcagatacacatgcgcatacaattgccagcggacatgcatacagctctttgagagaaatggcttttgcggcgtcaaacaacggactggaagttttatcaataacagaacatgcaccggagatgccggggtcatgtcaggaaatctattttcggaattttcaagtgattccgcgtgaaatgcatggcgtgaaattacttcttgggacagaacttaatattatgaatccaaatggagagttggatctttcagaaactatttgtaaaaatctggatattgtgatcgcatcgattcattctccatgttatgggtttggacatacaaaagaagaaaatacaagagcttatacagaagtgatgaaaaagccatatgttgatatcatcggacatccggatgatggcagatttcctgtagattatgaagtcctggtacggacggcaaaggagacaaaaacacttctggagatcaataacagttccttgcggccaaacggatttcgaaaaaatacaagggaaaatgtattgcagatgttagatttatgcaagcaatatgaagtttgtgtgacaacaggaagtgatgcacatattgatgtggatgccggaaatttcgaatatgtacaagaagttttggagtattgtaagtttccggaagaattggttgttacaactgaatttaataaattaaaacagtttctgaataattataaagaatcataatatttttgcaaaagccttaaattgtctgaatctctaaaatctctataaaaaagtggactttaaaaatttaatgtgataaaatgtaaaagtaatgacctgactgaaaaaggagaggtaagagatgagcaaaaaaatcaggacggaagcagtagattgtctgtttgatgcaatcttgagtctgaaagacaaagaggagtgctatacattctttgaagatatttgtacgatcaatgaattgctctccctttcccagcgttttgaagtggcaaggatgctgagagagcagaagacatatctggagattgcagaaaagacaggtgcatccacagcaaccatcagtcgtgtgaaccgatcattaaattatgggaatgacggttatgatatggtgtttgaacggatggaaaataaaagagatgaacaataaaaatacccggcaagacagccgggtatttttattgtgaaggattgttttggtctgaaaaggtatcgatcaatttttcaatcatcatttttttgacgtagacatcaaagctcagactgcagataaacgcaagaatctgaaattgttctttctgtgcatcgggaatcttggagaatgtctctccggcagtttcccaggcagaaatgatctcttctttcagaggttcaatctgccccttgcacataacacagatctgttgatatatatctgcaagaccggaagaatctttaccggaactttgtccaaatccggcatctgtcataggcttgagcaatgtctcgatgtctttgatcgaaagaatgtttttaaaatagtaaataaaaatcagaagaagcagatgatctttggaatattttttcttcacaggtggtggaagcagattgtttttcgcgtaattgttgatcatagttttagttaaaatcttgtcatcttcatagcgcttggtcgaagaaagctgagtatccataaaggtagtcacctggtccatgtataaatcaatattcggaatgtcctcaggatgaatgtaatcaattcgggacagactctccagtatgctgtttaaaatatcattcgtatcaattgtcatataatcacctcgatgtacttattatatagtaatgaaaaccagatagtcaagatatatttattattgacatatgtttataatgagagtagaataaaagaaaaaaacgggaggtattttgagatgaaaattgcagtaacttatgagaatggtcaggtgttccaacattttggacattgtgagaattttaaaatctatgaagtggaaggggaaactgtaaaagcagcggaagttgtgagtgcagtgggaagcggacacggagctttggcaggattcttaaaagagcatggagtagatactctgatctgcggcggaatcggagcaggagccagaacggcattggcagagattggaattacattgtatcctggcgtatctggagatgcagatgccagtgtagaggcacttctgaaagaagaactggtctttaatccgaatacaatgtgcaatcatcatcacgaaggcggacatacatgcggagaagataagcatggatgcggcggacactaatccgtattataaaataaatagacagaaaaaagacggctgtgttacactacagatatgaaaaatcaaaagtcaggaggttttcatatgctaagagtggaactcagccgttttaaattaaaagaggggaaaaggttgacttaaacgaaactatgttcgataatagagccatgacaattaaaggagatcagttatgagcatttacgatacattgaatgaacagcaaagagaagcagtctattgtacagatggtccgcttctgattctggcgggagccggttcgggaaagacaagagttctgacgcacaggattgcatatttgatagaagaaaagggtgtaaatccgtggaatattctggcaatcacgtttacgaacaaggcagctgcggagatgagagaacgagtggataatctggtgggatttggttcagaaagtatctgggtgagcacatttcattcgacttgcgtgcggatcttgaggcggcatatcgatcgcctgggatatgatacgaattttaccatttatgatacggatgatcagaagacactgatgaaagatgtctgtaagctggtgcagattgatacaaaggtctataaggagagaaatcttctggcagctatttctgcggcgaagaatgagatgatttctgcacaggagtatgtgcttaatgcacagggggattttggaaaagagaagatcgccagggtatatgaggagtatgaaaagcagatgcatgccaacaatgcgcttgatttcgatgatctgttggtgaagacggttcagctgttccagacccagccggatgtactggaaaattatcaggagcggtttcgttatatcatggtggatgagtatcaggacacgaatacagtgcagttccagctggtgagccttttggcgggcaagtacagaaatctttgtgtcgtgggagatgatgatcagtccatttataagtttcgtggagccaatattcagaatattttgaattttgaacaggaatttccggatgcgacggtcattaaactggagcagaattaccgttctacaggaaatattctggatgctgccaatgcggtgatcagcaacaatgcaggcagaaaggacaagagactctggacagataacggagaaggagagaagctgaaattctgtcagtttgataccggatatgatgaggcagaatatattgcggatgatatagaagaagaagtgcgaagtggggcatcttaccgtgaccatgcaatcttgtaccggaccaatgcacagtctcgtttatttgaggagcgttttgtggcacagaatattccatataagattgttggcggtgtgaatttctatgcgagaagagagatcaaggatgtgcttgcttatctgaagacgatcgataatggaaaagatgatctggcagttcgaaggatcatcaatgtaccaaagcgtggaattgggctgacaacgatcaatcgaatacaggaatcagcggcatccagagacattggattttatgatgcgctgcagggactggatcttataccgggagtggcaagaggtgctgcaaagttggaagggtttgttgctctgatcgaatattttaagggaatcgcagagaacttaagtctgtcagatcttttgcaggaagtgatcgataaaacgggatacatagaaagcctggaggcggaaggaaaagaagaagcagagacaaggattgaaaatattgatgagctacgaagtaaaatggcagtttatgaggagtcttgtctggatcgagatgaaaaaccgacattgagtggatttctggaagaagtagcactggtagcggatatcgacagtctggatgaagaacaggattatgtggtgctgatgacgctgcatagtgcgaaaggactggaatttccgcatgtatatctggcagggatggaagacgggctgtttccaagttatatgaccgtaacttcagatgacatcgaagatatggaggaagaaaggcggctctgttatgtgggcattacaagagcagaacagaagctgacactgaccagtgccatgcggcgtatggtacgtggtgagacacagtataataaagtatcccggtttatgcatgagattccgatggaattacttgaaaatggcagaagatcttcgaatatgtttgaagaaaagcgtgagattccaagacagaatgcgtatactcaggcaaaacaggcatttcaaacaaaagcatttgccgcagcagcaccgaagcagtttgcggtcagtaaagaaaaaggtctggattacggtgttggtgatcgtgtgcgtcatatgaaatttggagaaggtacggtaacacagatcacggaaggcggcagggattttgaagtgacagtggagtttgacactgcgggagttaagaaaatgtttgctggatttgccaggctcgtaaaattatagaaattctatgaaatttggcataaatcagtagtaatctgaaaatgatagtgttataataatgaaaaataaacctgtacggcggcatggagaaaggacgtgaatctatgagtaaagttgaggaattgatcgcagaatcaagactgaacgaattactgaaaaagaaagatgatgaaaaagtgaaaaagacagtcatctgggtattggcgattgtaggggctgttgcggcagtggcagcgattgcatatgcggtatattgcttctttacaccggattatctggaagacttcgaagaagattttgatgatgatttcgatgattatttcagtgaggaagatcaggtttaatcagaacgaaaagagaacagaagacaggatgtggtcggaatatactgcaccctgtctcttttttcgtcaggatgtattgtacgaaaaatgaaaaaaagataaggacagaaggcaatgaaaaaaggacaaatattagaaggaacgatagaaagagtggaatttccaaataaaggaattgtgaaggttgcggaagaagaaaaaagcgtgatcgtaaagaatgggattccgggccagaaggtaagattctgtgtgaataaatttaaacgcggaaatgcagagggacgtttgctggaggtgttggaaaaatcacctctggagacaaggaatccggtgtgtagtatttttcctgcatgtggaggctgtatgtatcagaccatgtcttatgaaactcagatggatatgaaggcagcacaggtgaaaaacattctggatgaagcagtgaacggtgaatatctttttgaaggagtgaaagcaagtccgaaagaatttgcgtatcgcaataaaatggaattttccttcggagatgagcataaagacggacctttgactctgggactgcataaaaagggcagtacgtatgatgttttgactgcgtcagactgtaagctggtgcatgatgatatgacaaaaattttaaactgcgtgttggcatattttaaagaacgtaatgtcagctattataaaaagatgcagcatacaggatatctgcgtcatttgctgcttcgaagaggggatcgtaccggagaaatcctggtcaatctggttacaacgacacaggaagaacacgacatgaacccgttaaaagaggcgcttctgaacctggaactggaaggaaggatcgttggatttctgcatattttgaacgactccctttctgacgtagtacagagtgatgagacaagaatcatttatggacaggattatttttatgaaaagctgttgaatctggagtttaagatcacgccgttttctttctttcagccaaattcaagaggggcggaagtgctgtaccgtacagtgcgagattatattggagatatcaaagatatgacagtgttcgatctgttcagtggaacagggacgatcgcacaggtactggcaccggtggcaaaacaggtgatcggtgtggaaatcattgaggaagcggtggaagcagccaaagaaaatgctgctcataatgggctttccaactgcagatttattgcaggggacgtctttcaagtgttggatgagattgaggaaaaaccggatgtaatcgtgctggatccgccgagagatggcattcacccaaaggcgctgccgaaaattctggattatggagtggataagattgtgtatatttcctgcaaggtgacaagcctggcacgggatctggaaatgatacaggcaagagggtatgaggtagtgaagagcgtggcagtggatcaattttgtcagacggtgcatgtggagacggtctgtttgctgtcaagaaaagataaataagtgccgaaaagcggcgtatttccgggctttttgtaaggttggtatcatcgtaagaagccttgcggaaagctcggttttcttgtatggaaacatatctactttttggtctgagtggagagaaatggagtagccggagaatagcggtagggtttaggctgtggattagatgtcagaggttgtggcaccaggattgttgtcagggccgaccgcagtttaagccactcgatactaaggggcagacttggaagtgggatagataacaggaggatgtacgtggcgaatggatattagagatatagaaaaaataattgatgtgtttcatgaaaaccatccagcatttactggaacaaaacaacagatggtatatgatttactcgcaacatttgaagatttatgttccttagcaataatgggtagtatattgaatccgttttctatgagaaaaataacagattacatggatgcgttaaatcaagccctaaactgggtgcataatagctctcttaattcttcagaagtgcctattaattcaaggattgaagaaagtaggtatgagaattgtgcctcacttataaatgattatgcattgccatattcagttatatgtagcggctatatttcgtattcaagaaaacgattaatagctaatgttgaagaaaataatgttacatttgatttcccggcaaatggaaacaagtccgcatggaatgatattttgagagaaacaagtcaaatgggaattaaaggatttatggaagctgtgaatcctatgaaagtatcgtcagcttatggaaaattaaaagagcgtatttcgatacaagatgaagaactatgttatgagctgacgggagaggtaatcgatgctttttctgggattgcttcaaagcagtgggaggcaacaaaaacacttccatcttcatggaagtttgacttgttctcattagaagaatacaggaaagtttggattgcattgacaaccttatcctatatacatcttttcagcagtctgacgatacaggatgcattggttagattgaagaatagtacgataatacaaccgatggatagcattataaattatgttgaatacatgacgagcatagataaagagactgtaaaaaatatacttgattacattacgtttgaacctgaaaaaaggaatgtcgacattatgtaccagccgatagttgttatgcccggaagtattgcagttatagcgccaatattatttgtgggttccaatccagagagaaatctattatctgtagttagttctaagacggattttgaacattctaaggaagttaatgatttagaaaacttaatggtggaagaaattgaagagaaattgaaaaagcattcaaatctttgtgtcgtaaagcacagaaatttagaaggacggttgcccgatatagatttaggtatttatgatcctgattctaatgcggtattgctatgtgaattaaaatggtttatggctgcggactcttctaaagaagtatatgcaagagaagatgatattactcatggttgcgaacagtcgtcacaaattatgacgtatgctatgaaggataaaaaaacatttatgaaaaaagtgtttgaaattaatgattgtgataatgtagatttattttgttgcgttgttgcgagacacaatattagaacacagaataaatatgtgccggtaattgatttgaagaaattaaaggaactatttagcagtaaatcaccagtttcggtatttcatattattcgaaatcatgagtatgaagaaagccttcctgaggacacatcaataacataccagactgtaacttatggaggatttactttcaatatcccagcaatttgctttggctcaatgccagaatgaaaatgggctccccatcatcggaaattatccggtggtaaggagccttttatgtctatgaagttatgcgtccacatcaatgctgacgccggatttcagttcaactgtgatgtggtcatcccagatggttatctgcttgatccagcgtcgcaccagtggttcatcgaattctgtaagataggtggtctgctgtgcgatgtaatcctgcaggtcgttgattcgctttatctgttcgtcccttgcggcggtatcgacggttgttttctggcgaagttctcggagtctgaagatttcatctgctatttcgttgtaatccacataacgatagacaccagttttctgaagtggcacatcgctgtaggtttcaatatcgatgctaagtgttttcatgagattgtcctttctacaaaacaggcagcagagaaatccctgccgcctgccgtgttactgtttatctttattagatttgtatttattgatgtcacgacgaatgtggtataccgcataacgaacaaggtaaaaaatgatttttcctacgttgtagatgatgaagccgtatactgccgcaaaaaaggtataggcgatgacattagcaataaatagatttaagatttctgcaaagtcattcatagattgtctccttttgtcagaaaatgtgctggcggcagtgagcccaccgccagcaggttgataagttacttaaagtctttcatgcgcttttcgtggtattcgaggtagagcttgtccttttcctgctcacgcttttcacgtttatggtcgttgatgatactctgaatcatagagattgcagtagtaagaccgacgcaagcgaagcagccgatacagatgtttacaagaattgtgctaatcacgattgtctccatagtttgctacctccattagtcaagaaaatcatcgtcgtcatcagttgcaaagtcagattcagcagatgccttaccgccaagaggctcgccgtcatgaatcttctgcagattgttaaggccgcaggcgatgcctttattgccagagctattgaaagcgtagaaactgatgctggcacgaccgtagactccagagtaaaccttagaacgagtgaggataggattgcggtccgcatctacgataccaggtgcagaggttgcgtttgcattcacaaagtagctgccagcgtatgcaggatcatccggtctttcaagatctccatcacgaagtggcgttttaagtacggaaagagcaggtacggacttaccattgcccttgagctttgcttcaccttcacggtatgcagcctcgatagcagcttcaatctttgcaacagtctttgtgtcggacttcgggataatcaggctgacactatatttcggagtgccaccgttgatggacttaggttcccagacgttggcgtagctccagcgtgtgttaggaccagtgataaccttcatgggatttgtcatttttacatttttactcattgtcatattcctccataaaatcattttttgctgtgttcattgccgggcgcttatcgctttccggcacaagagtaggtttgccttgtggcttttcaatataggctgcaaggagttcctcgaagcgagatttgccgagtaacttctgcatagcagtgataccaagtagtttcttttcataagggtcaaaaccagcagcttcgacagcctttgatacagcgtcttcgttggtgtatctgcggttggagcgaccctcgaccagtttccagcctgtccattctttaccgctgattgcctgctgaagtgcatactccttgatgtcgttggctcaagagaccagttcgtcgacacgggaaaggataacttcgatttccgaatcttccaacagaggtggtagtttgaaatcgtgctgtgcgagtaaaagattggcttctgctctggccctgcattcgtgctttgccttgcagaatccacaccattcaccgcacaggaagtttccatcaccggcaaaggctaagtcagcagtaggtttcaaaacttcgtcggcccactgatacaggttatccttactgacttcataggtagaaacgttctgacgtctggactggtaaatggtcatgctgaccgtatctatgtcataaatatcatcaaaaagctccagagcgccaagggcgtaacatttcatctgtggattgtctttagcggaaacaaggattccaagaccgtgtttatagtcaatcacgtgcatagttccatcgctgatgagaatagcatctgaggtttcaaagccttgttctacccaacgtgagaagtcaactcgctgttcaatcagaacaactggatcggagcaggtctgcgtggcatcttccaaaagctccataataaagctggcgtatccggtggcacaatcttccatttcggagttgtaccaatttaggctttttgttggatcagtagctttcatgccgagagctttacggagcttgtactcacaaagagcgtgtgtgtcggtgccttcagcagcataatcactacctttatcctcgtaggtttcgcagagccttgccgacggtggacagtgaagccatcggtcagaagaggatgcggagaggagagcatgtccttttggtggcatattagagcacctccgcttccctgagcagggcttcataatgttttgggtctacgagtgacagcttgcttgcaccgtactttttaagaagttctcgaatttcagctgtatgtccggcacgagatttgtcagccagaacagctcgaacctcctcaagggttagtgcaggtttcgcaggagcggcagggtttttaattttttcatcggctttagatgttccgccaaactgctgtgcgagccagtttgctgcatcgttaatagcagcggcagcatttctcagttcttcgatagtcatagccatatcgttcatttttgacatttgttattcctccttcctcggattgtctgtgtgcggcgatgagtctaagattcttcgcaattcttgcggatacctgactgattgctgtgagagtagcaattatttctgcgtcagtgccgcttctgttgtgaaaggtctgattcactgtgttcacctcgctttctgtaggtcgctttgtttcgccttacactactcaatggaggtgagatggtcgtttggccgaaaaattataaaaagttttttgaaaagaaaaatcgtcccctgaaatatcagaggacgaccattcaaattagatgtaatctttcagatctgagcgaagcttctggagtagcttgtccctgcggtatacaaaggtgttacgggagagccccatttccttgccacagtcacgctcagattttccttccataataagctggcagataagacggccttccgggtccagctcgttcagctttgcgtagagggcaagaagaagttctgcgtcttccattaattcagcgatagctgcggattcatccggcatgtcatcaagccagctcttttcatttccttcatcgtcgcttacggtgttatcgagagaaagctggtcgccagccttagcatacggacaggtcatacagtccatgtcgcataaatagcgtttgcttgcagggcagacacaacggccatgttcctgctgacgtttgcggtaggcattgatgtcacgatagtagttcgtgtagaactccttgttgacatccacccagcttttggattctttaatgtagatacggtacgcttgactctgatttacgttgtttgccataactgttacctcctgtgattggcatagatttgtgggcagccacaggtggaaacagagatttcagacatatttcgctgcagagttcattgttcgttcatgttcgctacattgaaaataatgtaagaaagtgttataatgatttagtagggtttgttgggggttgctctgatttgtattcatcagattcgacgaccgacaaacatcaaaaaatccctgtggcttttcacagggatagaaaatagtaagttgagtaggcctgccattcacagttgagtaagttgagtaggtaaatttgattagagggacaatcaatgacaaaaaatgaaaatttaagactgtgtggcggtacgtttttcaccttacttttagaggctagaaagcaactgctgggtgcaaatgaacactacgcagggaaaaaagatggattaactgaatatgaaactttgattggtttggctagagtgatacgctctgatttagcggcaccaatgccgactgaaattaaaacaattcaaggtaacgcttcagaatataaaaaatgcaagaatgtaggcggaggctacttcccattcggtgataaaacggcattgagagtttttgacgaaagagtgaagaacgagtatgtggatacattgagaaaaatgtgctgctttgtggatggattcattgatgctggaggagatataaaaaaagacgagctgctcgtgaaagcactcgtcgaactaatagcattggataattacattgatgacagccaatctttctatattagggaagatggcacaacagcgcagaagaaggaactcgtaaatatgaaagagattcctttgcagtcatttctattaggcgtatttcattatgctgtatgtaatgttgataatacggctggggcagaaacatttgagatttggtgtccatccacgggtggaggcaaaagggcttacattggagatattggtgttaattggcctggcgatattaagctcagttatattgaatttgaagatgacgacgtagccgataatcaagcagataaatcgccagatgatattatcgttgaagaagtctatgaagaacctcgtcgggaaaaagaaaagtcaaaacagcaaatggttttcaattttaatgtgaccggaaataataatagcttcattcagcatattgatagcattacgaacaattattatggagggcagaaaaaagatggagaataaattacaaccatcacaaccgggaactttgcaaacgcaaacaccgaatacaacatttaatttgcccggtaacaataatacgttggtagctcatacggatgcagtgaataatacctatagcgtaatgatggtgggcggagcaccacccatgccgggaagccctaacgcagcgcataccattacattaaatacagatttctataatcttctggttgtcggggatgatgaattaaatcctcagtactgccattgccttgttcgaaaggatagagcaataacggaaagcacgtcaaaagaattgaaagcagcttatgcgactttgtcagatgatgcaattttggcactgaaaacctacccagcaattattgcgactgagaaccacgcttatggaaaaacggacgcagaccactatgctgcttatgggttgattgttgatgtgaaaattcaggacaacggtatcaaagtatattatcaaatactcaattggataccacagcagaaaataaatgaacttcggtttgaactcggaatcgaaggctgcagtggaacgaatgaattgaatcgtatgcactgggcaataaaaaagataaatgcagtagaggtattaagggaagctgggatatcagtattctccctataaatatgtaaccactcatctggaatcgaacatggaggaataatatgagtgcagaatatgaaaacatgcaagttgaaaaatgggtaaaccttgaagatgtagcagaacatctcagtttgagtcaggatacagtccgtacttggataaaagaaggaaaattacctgtatataaagctggaaaacgatataaattcaaaatctctgaagttgatgaatgggtcagagaaggaaaaattaaagaatagaagcaggaggtagatttgcatatgaaccctaaaatgaaatcagcaatagaaaaaataacgttaaatgatgccacattctctaatgaggttatagaaccgacgtatgtaaatttcttctatgggaagaatggtgcaggcaaatctaccattgcacgaacgttcaaggcaaacgatgagcatttacagtggcaagctggaagagcatcagctgattatgatgttcttgtgtatgatacagattttataaatgctaacctgcgcaactatggaaatcttgctggtgtatttaccgtaaatgaaaccaacatcgctattcaggaacaggttgatactctcaatgctgaacgcaagaaaatgggcgaggaatacaacggacataaggccactatagaccagaaagtagcggataagagtactgccttatcaacattccagtcagattgttggagcaagagtgcggaagcaagaacgctgtttgatgaagctatcaagggtaagaaaaaggcagccttatttgctcaagagattttagcgattactccggttgcccataactttgatgaattaaaagttctatatagtaccgttttttcaggcgacacacagcagtacaatatgctgtctaaggcaggcaaagttacttatgcatctctgccgggatatgaattgatgggcaagccaatctccagcagtagtgatacggatttcgcaaaatttataaaagcactaaaagctactgattgggtacgaagtggtcacactcattttgctggtcagacagatggtaaatgtccatattgccagcagaaactcccgtccaattttgataaagaaatagctgcatgcttcgatgcacagtatcaggatgacatctctgcgatttatgcgttccaaagaacgtatgaatcagagatggattccgttgtagctacactggaaggtaatgtgtctgccgctatgtcgggattggacctgtcagaatatgaggtaaaggttcagcttcttattgatgctattacaataaacaaacagaggattgcagcaaagattaaagaaccaacaacgattgcttcactagaagataccgatagtttactgattgagattggaacactgattgatgggttcaataagaaaatcaaggaaaacaacgagattgtcagtgaccttaaaacaaagaaggttttatgcaaaaagcaggtgtgggagtatcttgcagaactcttgaaagctgacgttgctgcgtacaacaaagcgctaactgatttggatgctgaaatcaaattattgaaagctaaaatggagcagttaagaaaggatgccactgctaagaaggaagaggctaacgaactaaataagcagattgtgaatactgaggctacgattgatagtatcaatgttctgcttgataattctggttttgaaggtttccatcttcgtgcgaaggatggagtagcaaatacatatgaagttattcgtccggatggaactgttgcagaaaaactgagcgaaggcgaaagaaactttattgcattcctgtattactatcaccttgtgaaaggaagccttagcagcgaagctgtaaaagataaaattgttgttatcgatgacccggtatccagtatggatagcggagcattgttcatcgtcagtgctctggtcagagagatgattgaggtttgttacaacaatacggattatcaaagtcataaggtcgatggcgactatattaagcagattttcattctgactcacaacgtttatttccataaggaaattactcatcaccaagcaaagagataccacagtgtttcattctatatgattcgtaaggtagaaaacatctcttccgttaaactttgtgtgcgtcagagccagagagcacctaccgagaaagaaaactataatccgattcagaactcgtatgctgcactttgggatgaatataaggagctgaaaacggcaaatacagtgaagaatgtaatccgccatattcttgaatactactttattcagatttgtggctacgaaggaaacgacctccacaagattgttctggaacagaataagccgttgtttgtgaatgaagttgaaggacagaagccgaattacgaccgatacaaccttgcttcaagtatgctcacatatatgaatgacggcccggccgttatcagtgatggcttcaactatattgatgatggcagcgatgtggaacagtgcaaaaaggtgtttgagatgatattcaccgctatgcatcaggaacagcactataagatgatgatgggaatcgaggactaagtcctgattattggatatctaaaaatataaaattaacattgactaagaagctcttagtctgaatggaggaaaatataatggcacaaaaacagacaatcgatgcaatgtgggatgattcccctatcgatgtatcaactgaggtcaattttatctggtccattgcaaataagctgcgtggtacataccagagtgataaatacaaggatgtaatcattccgatggttattatcagacgttttgagtgtgcattggaacctaccaaagacaaagtggttgcacagttcaaagcaaatccaaactatccggcaaaggcgatgtatcgtatttccggtttccagttctataataccagcgaatttacgctggcagagctgattaacgatgcagacaatttagcagctaacttcaaagcgtaccttcagagtttttcgcctaatgtgcaggagattattgtatctgccgagaaaggcctcgacttttacaagcagatcgacaagatggataaaaatgaccgtctgctaagtgttgttaaggcattttcggaattagatttgaatcctcgtactatcgataacgtaaagatgggatatattttcgaagacctcattcgaagattctctgaaaacgctgaggctggtgaccactatactggacgtgacatcatcaaactgatggtgaacattttgttggcagaaggctgtgacgatatttttgatgatggaaaagttattacagttttggatcaagcatgcggaaccggtggtatgctttctaccggatacaattttatcaagcgttataatcctactgcagacgtgcgcctttttggtcaggaaatcaatccggaatcttatgctatttgtcttgcagagatgcttattaaaggacagaatgcagaaaatatctgctatcaggacaccatgaagaaggatcgctttgaggggacaaagatgcgtttcgtaattgaaaatccaccatttggtactccttggggcggtaaagatgctgctgaaggtgtagaaaaggcagttaatgatgaatatgcaaagggcttcgacgggcgttggggtgctggagttccgggaacgggtgacatgcagatgttgttccttcagtccgctatcgataagatggatgacaattttggtagagcggcggtgattgaaaatggtagcccgctatttaatggaggcacagcatcaggtgaaagtcaaattcgtcgttggatattagaaaatgaccttgttgaagctataattgcccttcctactgaacttttttataacactgagattgcaacttacatttgggttatgtcaaagaataaacgcccagagcgaaaaggcaaaattcagctaatcgatgcttctggaatctatcataaactgagaaaagcattaggaaaaaagaagaacgaaattacaccagatgataggtcggcaattactaagctgtatgcggattttaaggaatgtgaggatagtcgcatatttaaaaatgaggactttatttacaaggaatatgccgttatgcagcctcttcaaagaagttatgctatcacagaagagagaattcagtatatgcttcaatctggttcgttaagctcactatatgatgaaggaaaggcaaatgagctacaagactcagaagagcttactggaaaagaaaaaaagaaactagatgactatttgaaaaatcaatcgatttatgaatctatcatagaaatattaaaatcggcaatttccgaagagaagtatctttctgagaaggagtttattcctgtattgacgaaactattatcaggggttgtgtctgataaaaaattgattgccaagattgcaaatggattatctgaaatggataaatcagcagaaatccagaaggaccgcaaagggaatattctatatgacaaagacacaaaagatacagagattatcccatttgaggaagatatagatgactacatggaaagagaagttcttccatatgttcctgatgcaaaagcattctgggaggaaaatttaggggcaaagaagccggttatcaaaacaggagcggaaattcctttcaccagaaccttttataaatatcaagcaccgaaagctagtgaagaacttgaggaaagattcgtagaattagaatctatagtttctcaaagtattacaaaactgtttggataaggagggataatcatcatgcaaacgatgaaagatacaaaaatcaaatggcttggtgaaatccctgattcttggcaattgaaaaagattaaatatgttttacaggagagaatcgagaaaaacaatcctgtaagaacttcgtatatattgtcattaactgcaaagcagggtgttattccatatgatgagaaagagggaggtggaaataagcccaaagaggatgtttcggcatatagattagcttatccgggagatattgttatgaacagcatgaatattctttcgggttctgtgggattgtcgcagtactttggatgtgtaagccctgtatattacatgcttcgtccaaaggaaaaagatgatgatgtcagatattataattacatttttcagacaacattattccaaagaagtttatttggattgggaaatggtatcctgattaaggagtcaggaaatggcaaattaaacacaatacgaatgcgaattccgatggataaatttggtggattgtatattccgattgcgcctaaagacaaacaaaagaaaatctcagattttttagatgaaaaatgtggtgatatcgatttattaatcaaaaatatccaagaagaaattgatgtattagaagactataaaaaatctgttatatctgagggcgtgacaagaggtttagataacaaacctgctttaaaggatagtggcatattctatatgggacctattaaagaaacatggtctatttcaaaaatcgggtatatttgcactaaattatctagaggctttttggtggaggacactgcattggtatgctctaataaagggaaagtgctcgttagagatgaaaaggtagtaggaaaaatggtaagcgaagataacgcaatgcagggaattaaaaaaggagatattgcaatacatggtatggatacatggcatggagcaattgccttatcagaatacgacggtaagattacccgagtagttcatgtatgtgacagcacagaggacaagcgttttgtggtgtattatatgcagtatcttgcctttcagggagtctataaacttatttcgaacggagttagaggaaatactagcgacttccgtagctgggataaagttaaagatatttacatccctttgcctgagtcaagagaagagcaaaagaagatatgtgaccatttagatttggtttgcaaagagatagaaacagcaatcgataacaaaagagaacaacttgacatgctcgaacaatataaaaaggcgactatttatgaatatgtcacaggtaaaaaggaggtgccagaatcatgaaaatagaatatgtcacttccaccattggtataggaacagagttgcacatctcagctgctgaatttaagcgtgtcaatagcgaggctggcttcaatgaccatgctaatatgctgtttgctgtgaaagcgtatgctattgcaaacgaaagtacaaaaatatatcgaagtagagacttggaagaagcgtatcgtcatatcaaaaaagccggaacgattgtgttagcaacaaaaacggatggagtagtaaactggtgtgaactgtatgctgtaactgaaggggatatcattcctgttatcacgagtaatgatggccgtgagtttacgattaacttttcaaataaaacaattcgtgaaaagaatcgaattaggaaggaggagtaatcaatggacgataaagtgacagttgagattactggatttgatgcggaaaaacatgcagaagatgccgctaagagagcaacagcatacagtgaaatgcttatccatcacgcatccattgtatctgaaaaagaatatcagaagttccttcttgagagacttgaaaaggacaatggctacattattcgtaaggcgaacaactttgaccgctactttgcagtcgaccgtgagatgctgttcaagtttcttgaagatacacagcacgaaacgatggattatttgagaaaaatatataaggctgatttggagaataccattgtcagctttatcaatgcagaagcaacaaaggctcgtggtagccttctggatgttctaaagcatggaattgagatttccaatcagaagctggaactgatgtatacaaaaccagcaactacattcaatcctgatttaaccagaaagtatggccagaatattttctctgcaatggaggaagtatgggccagcgataaggaaagaatcgatgttgttatcttcctgaatggattagctatcattgcgtttgagctgaagtgcaacgctgcaggtcagtcttatcaggatgcgatttaccagttcagaactgaccgtagtcctaagactcgtctttttatgttcaaagcaggtactttggttaactttgcaatggacttagaagaagtgtacatgacgacaaaacttgcaggcgatgctacatttttccttccattcaatatgggtaacggagagggcgtaactgctggtgctggaaatccggtatttgaagataagtatagcgtgtcctacatgtgggaagatatcctgacaaaggatatgattctggatttaatcagtaagtttatctttgttgaaacaaaagaaaaggttgatgataaaaccggaaaaatcaaacgctctgagaatttgatattccctcgttatcatcagcttgatgtcatccgaaaagtgctcgcagatgttagagagaatcgtactgcgcagaattatctgattcagcatagtgctggctccggcaaaacaaattcaatcgcatggctggcacaccgattgacttctcttcatgatgcagagaacaagattatctttgataatatcattattgtaactgaccgagttgttgtcgaccgtcagctccagaaagcaatcatgggaatggagcataagactggactgattcgtgttatggatgataggtgcaattccgctgaccttgcgattgcactgaacggtaatacaaagattattgcaacgacaattcaaaagttcccatatattgtcgacagcgtaaaggggcttgagaataagagctttgctgtaatcatcgatgaggcacattcgtctacctctggtaaagatatggcagcagttacaatgtctcttggctccggagaccagacggaagctgatgttgaagatatgatttccagtgaaatcaagagaaacggtaagcagtccaatgtatcgatatttgcatttacagctacaccaaagccgacgacaattcagctgtttggtcgtctgaacaagcatggtcagagagaagcattccatgtttattcgatgaagcaggctattgaagaaggattcattcttgatgttctccagaactacacagaatattcgaccttttatcagcttaacaaggaaattgaagacgaccctcgttgcaaaacgaatgcggctaaaagacagattgctcgtttcatagaactacacgaaaccaatatcgcacagcgtgttgaggtgatcgttgagcatttccgtacaacggtaatgcaggaacttggcggacaggctaaggcgatggttatcacagcctccagacaaggtgctgtaaaatatcgtcaggcatttgaggagtacatcaccaagaaaggctacgatggaatccatgcactcgttgcgttttccggaaaggttaaacttccagatgatgacaaagagtatacggaagcatccatcaatggtttcccagaggatagacttacaaaggaatttgatacagataactatcaggttcttttggtagcaaacaaatatcagacaggttttgaccagccaaagctatgtgcaatgtacgtgctgaaaaagctgaagggcgtaaatgctgttcagactctttctagattgaatcgtatctgtgctccgtatgataagaagacctttgtgcttgacttcgtaaatacatatgaagatatcaaagcagcgtttgctccgtactacacaactacattgctggcaaattcagtaacaccaaatgctatatatgatttggaagctactattgatgcctatgctttgtttgacccagcggatattgaagctgcaaacgatattctctattcacagaaagtgactggaaaacagaagcagagattgacattcttctttcagaaaagcaagaagttgctggaacattatgaatatgaaacgcagcgtcaggctgttgcggatatgcgtggatttgttcgctactatgagttccttcttcaggtttccagcttcgaagatactgaattgcataagaagtacaacttcatatcttacctgttagcttatatcaatatcaagcatccgggcggtggattcaatctggatggtaagattaaggcatctcagtttgttcagaaaaaaggagaagaacatgtttcttctgatcttgttgcaaagccggtaatgaaacttccaacagcggagcattttgggcttacagaggataaggaaaagagactgtctgaaattattgatgagataaacagcagaaccggcaagaactatgataatgatgttgttgtaaaggctatgctgcagattaaagatatcctgatgaaatcagacaagctcaagaccagtgctaaaaataatacacagcaagactttgagttctcttattttgatgatatcgacgatgcactcatcgagggattatcgcagaatcaagacttcttctcgatgctgttgtcgaatgatgaaatgaagcgtcaggtgctgggtattttctctggagagatttataagagtctcagagaatcattgtaaaggcggtgataaacagtgtttgacaaatttcgactaaaagaggtactggtagagtacaaaaagcgttttgtgcagcagcagtggccgaatgaaaaatacaaatgggaagcggtacaatgctttcagttgaattgggatgttaattcagatgactttgcgcagatgcttacaaaggcacttgcgcagactgctaatttacttgcgtctgttaataacttcccagcaagaatgattactaagtttgcggagattgctccggaagaagtacgctcgatgtatatcgaactctatgacgagagtaaggatttatacgagagagttgctaactttaaaaacaaatccaacacattattagagcgctacggaaatggagcagcacagcattatcagtatgaaaatgcgataatgacatatttgtggctgcgctatccggataagtattacatctataaattaagcgaagtgaaagctgtctcatcggaacttgaaagcgattatcgttttaagaagggagcctatgctgataacatcaggaactttgtggcattctatgatgagatatgtgctgaactgcagcaggacgatgagcttagaaatttgcttaattctcagattacatctacttgctatgctgaccctgagttacgcacgcttacgatagatgtaggattcttcatttctcgttattggaataaagaggatgaggaccctaaagctgatgaatggtggccgacagattatactccggcattaacagtcgaagattgggttggccttctgggtgattcggaagtgttcaatgagagtagtctggaaattatgaaaagaatgaaagactacggcggcaaggcaacatgtactcagcttgctgtaaagtatggagagacgaaaaacttctataatagtggttctgtttcgcttgcaagaagagtcgttactaaaacgggatgtcctgttatggcgagagatgaagaaaatgctcgtttttggccagttctttatgttgggaaaaacgctaacaaggatgaggaagggtcttatgtgtggaaacttcgtgatgagttgtcagaagcacttgaacaggttgatttaacgagtgttccactatatgcacagctttctgaaggagaaaacgggcagcaatattggttcctaaatgcaaatccgaaaatgtggagcatgtccagtatgcctgttggagaagttcaggattataccttgtttaatgacaatggaaataaacgtagaatcttccagaatttcattgatgcaaaagccggagatatggttattggatatgagtctactccagtgaagcagattgtagcggtatttcgtgtaagtgcagagcaggatggacagagaatatattttgaaaagttagaaggcctttcatcaccaatcgattttgcaacattaaaatcttgccctgaactggaaaagatggagtatttcagcattactcaaggtagcttgttcaaattaacaaaaggtgaatacgaatttatcatcgacttgattcgtgaagaaaacccagctcctacagctgagaagactaaagatgagtattcaaaagaaaaattcttggaacaggtatacatgactgaggcaaaatatgaccgtctcgtagccgttctcacaaagaagaaaaacattatcctgcagggggctcctggagttggaaaaacttatgcagctaaacgcttggcttattctattatgggtgaaaaagatgatgaccgcatcgagtttgtgcagttccatcagaactattcctatgaagatttcatgatgggttataagccggttgaggatggattcgagctgaaatatggtattttctatagattttgtcagaaagcagctaaccatccagataaagattacttctttatcattgatgagattaaccgaggaaatatgagtaaaatcttcggtgagttactgatgttgattgaggctgactatagagagacaaaagccacactagcctataacggtctcagtttctcagttccaaagcgtctgcacatcattggtatgatgaacactgctgatagaagtttggcgatgattgattatgcgcttcgtcgtcgttttagcttctttgatatggaaccaggatttgattcagaaggctttattaagtatcaggaaggattcgcaaacgacacattcaatactctgattgaccgcattaaggaattgaacagagaaattgcaaaagacaaatctctaggcaaaggattctgtattggtcatagctatttctgcaacacagatgaatgtactgatgagtggatgcaagatgtggttgattttgatgtgttgccaatgttagcagagtattggtttgatgataccgataaactgcagcgttgggagaatattttgcatggtgtatttcaatgacaaaggataaaagcattctaatcaataatatttatcatatgctttcttacgcctttcagacgctgaatcaagagacctatgatgatgttgcagtggagtcttttgatgagatgtataatctgctggctgcaatcctagcaaaaggcataggggtgcagctgaagcagggactctacagagaatacataagtcgtcaggaagagttgcctgttatgcgtggtaaaataaacatgccggggacaataaaaaacaagctggcacatgaaagagtgcttacctgtgattttgatgagctgtcagaaaacaatacattaaatcaaatcctaaaaacgacagtgatgctccttttgaggaatggaaaagtgctggcaaaatacaaggatgacttgaagaaaaaaatgctgtacttctccaatgtggatattattgaaccgacaggtataaaatggacatccattcgttttcaacgtaacaatcaaacttatagaatgctggttagtatctgtcagttgattatcgaaggaatgcttatcacgacagatgcaggtgactatagattggcgtcctttgtagatgagcagcgcatgtgcaggctgtatgaaaaatttattctggaatactataccagacattatcctgcattgtcagtcagtgcatcgcaaataccgtggtcgctggatgatggcgttgggaccatgcttccagttatgcaaagtgatattcacctgcaacgtggaaatacggtactaatcattgatgcaaaatactacagccacacaacacaggtccagtttgataaacatactcttcattcaaataatttgtatcagatttttacctatgtgaaaaaccgcagctatcaatttggagaaaaagagaatacagtttcaggtatgcttctttacgcgaagacggaagaagaaatccaaccggacaatgtgtatcagatgcatggtagtcagataagtgttaagacgcttgatttgaatttaccgtttgctgagattgctagtcaaatggatagaattgtggagtcacatttttctggattaacaaaggcatattaaagctatgaatttatagagtacttttcaattgaattgttgaaacgagatataacaaaaaggaggtcctcctatttgaaaaagaaaaacgacgaaataaccatccgttccagtgcagcggaatacctgacctatgttgcctctgtgggtgatcagcaggacagcattgaaatgcgctatgaggatgagaatatatggctgacacagaagatgatggctacactgtatgatgtggatgttcgtacaatcaatgagcatattaagaagatttattccgactcagagcttgaggaagattcaactatccggaatttccggatagttcaaaccgaaggttcacgtcaggtgactcgtgatacaaaacactataatcttcaaatgattatttcagttggatttaaggtaaataatgagcgagcagtgcagtttcgtaagtgggccaatggcatcgtgaaggactacaccatcaaaggctgggtcatggatgatgaacgtctgaaaaatggtggctctgtgcttacagtagaatactttgaccgtttgcttgagcagattcgtgaaatccgtctctctgagcgtagattttatcagaagataacggacatttatgctacagctctcgattatgaccgcacatcaaaaacgacaaagcagttctttgccaaggtgcagaacaagatgcattatgcagtttacggacatacggcagcagagttgatttatgagcgagcagatgccgataagccacatatggggctgaccacttgggcggcagcaccggaaggcaagattgtaaaaagtgatgtgagtgttgcaaaaaattatctttctgatcaggaaatgcgttcattagagcgtattgtttcggcgtatttagatctggcagaggatcgtgcagaacgtcacatcccgatgacaatggaggactggacaaagcgtctggatctattcctgatggctgatgacagagaggtccttcaggatgcaggaaagatcacggcagagattgccaaggctaaagccgagactgaatttgaaaagtatcgtgttattcaggacagactttttatgtctgactttgataagtacatgctggaattggaagaaaatgcgaagaagtaataagattgctttgctttttcaatgccggatttttaggcataacaaggtcgagtgcatggaaatctggacatcagttaggtctaaaaatggccattgacctgtttttgtaggaagaacggacaaggttgaggcgatggcacttcctcgcaagatttgacttttatgttggaatcactataatagtagaaacgaataaaaaagttgaactttttccgtgaacgggcgaggttaagactgtgatatggatagcggaatgtatcaagagttttctgctacagaatttgttgatatgtttccacgaacaaacggagatattttggtacaaaccatattagcctggataggttcccgatgaccgacatcaatccggacctatcgagccacgttgagacggtctgtttgctgtcgaggaaagataaataagtgccaaaaagtggcgtatttccgggctttttgtaaggttggtatcatcgtaagaagccttacggaaagctcggttttcttgtatggaaacatatctactttttggtctgagtggagagaaattaagcagccggagaatagcggtagggtttaggctgtggattagatgtcagaggttgtggcactaggattgttgtcagagacgaccgcagtttaagccactcgatactaaggggcagacttggcagtggaatagatgacgatgaaatattacggataagattcattatatttcaaacagattatatgaaagaaggataaactatgtatggaccagaaaagtaatgaactattgtgtgaagttgaagaggcaatagaagagattaagccgccttatactcctccggtacaaagtgcggatacattattccattttgttgataaactggagtacttattgccggttatagagcaatttgcaattataccacgatattgtactgaagatataggttatctgcagattggtatgaataaaatcgcatatccaatgttgtgcttttgtgatattaatctacataaaatgcaggaacatatttcattttatggtgggtatggtattgctttttctaaaaaatggggtatcgataagggaattcaaccggtacagtatataaacccaaaatcaattttgatagaggattttagaatagcatttcaggattcagttaatgctgaaactgaagattcagcgcagaacttcttgttatcacaaatgtattatttaaaggcaattgatggaacaatggagcgagatggagaatccgttcaaaagaatttcactgatgagtgtgaatggagattcatacctaatgttaaaatgatagagttaccgcaagcaataacagaagaagaaatatttagtaaaaatacttggaatagcgcactgacagtatctaaagaatgttggcttaaatttgatgcagatgatgtgaagtatataatattaaatgaagaagatgaatttgataaggtttcagaagttattagaggtaaaggtcttgctacaagagaatgtgacaaacttctttccaaaatattgatttggtcagaaataaggagggatttataatgttttctaattttaaagatacttttattagaaagcctcaatacatatccgagccacctaaagcagtaatggatgcaattagtagagacttgccagatggttttaagtatgtatatgaaagtgaaggtttttgcagacttgatgcgccggaagggtttaatatcgagtctgggactattcatttaacagaagaggaaaaaagtattttgccgaataacccttcgtttgaacaaataaaacagtattcatataattcgcagaccgatttagtaattgctcctgataaagatggttgttttaaaataaatggtgttcgaataaaagctcaagatattgttaaagcacctttgaaagatttaacctttgagaatatgtgcatgtatatgaagccaagccctttcccaaagccatttgaaataacttttagcggaaatgggtatgataaaacattgcatatgcaaagaacgccgcataagagtttatgtactcaacgttttgaaagtatagaaaaagctccaatttcagtagtctattatgtagatgtgaaggtaaataaatttacaataacatttagtcttcacattgaaggtgcaacgacggcatttgaagtgttatctgcctatgaaatttacaatgcatttatggatgggaatggaaaaataggaggcacacaattttcagagtcgataccatcattagaaaaaaaagtatctcaggaaacgatagatttttggaaaaaactatataaactagaaaaagtatttggaatttctttcgatatcaagaatggaattacagtaggcgacgcaagatgtatagaggaaatatatcgttgtatagtcgaaaaaaagccatataaaacatataagcaatataatagtgtaaagagaaaaggtatccctcaagaagtaagtgacactatttcaagtgacaaagaaatatattttgaatttagcactgaaggtcactatgaattattaggtcaagaaattttactaaaaggtgtttttggaatttttggtgcttgcataaaaaatccaactccaattttttcaagtgaagatgagtttgaaattatgctgcaaactgttgagggaaagaaaatgtatgaatcggtaatgctcttccaaacggactatgaagttgataaatttagaaaaaataaggaccatattaaaataatggaaaaggctgatgaaataatatcaatagaataaagatgccgtaatcttgaaaaataaatccaagctccccatcaccggaaattatccagtggtgataatcaccacgcaagagaccgccgacattgaactttacaaaataagcagctttctctgacagcttccggattttttacggtgccgggatattccagtatgcctcccggtgtggcaccgtttgcaaagaacttagaaccatattcctctgttgcaatagcaagaccgatcgcattcttggccatagcaataggagagtaaccgaccagaccgtcaaagccgaggcccggaatgtggagtacgtccgatggcttcagggtgacagtttcatttttcattgttggtgcatcggaatcctgcatttgatattgatagtagaggtggcctttgtcatcgcgatccacactcattcgattggccatcagtgggtagagagcgatgacttcacctttgccatttcagataatttacgcataggcatttccataaaggagaagatgtgtcatcaaggtctctcggaagacaaaggatgtcatttccggatttggctcatcgtgtatcaatcgatagaggggatgcttgatcgctttttctttgctgccagagtccgtgtatttatagacatggactggaagtccagcaatggactccgaaagaatcctgacacatgcatagactgcagtcatctgcatggcgcttcgttcgttgacggctttgccagaattgctaccaccaaagagaaagcgataggcactgccattggtgctgttggtgggcttgtctctggaatgaaacagtcctgataaaaatcccataaatattcctttctgccgcaaagggcgtataaaattcaaagtttcgtcataaaataatctatgcaaatgcttgcaatcgcaagcaaaaacgaatataataaagaaaaaggaggcgatactatggcaaatacatccgctgtttatgcaagaatagataccaatctcaaggataacgcagagagcattctttctcagcttggcatttctccatccagtgcaattcagatgctttatagtcagattgtactgaagaagggtatgccatttgaattgaaacttccttcttctaagccattagctgttggtgcaatgaccagagaacagcttgatgcagagctccagaagggtgtcgattccatcaaagctggaaaggtatattctgcagatgaagtcgatgcggcacttgcgaaggagtttggtatatgacggatagctataaggttgtctattccgtagatgcacttgatgacttgcgtgagacttattcatacattgcgaatgaactccttgttccggaaactgctactgctcaactgggccgcatccgaaaagaagttcgttcattggatttcatgccagctcgttatgcgttagttgactgggagccttggcattcgatgaaaatgcatcagtttccggtagacaactttattgtgtactatctggtcgatgacgagaaaagggtagttacagtagctcgaatattctacggtggccgtgatattgaaggaatcataaattcaaataaataaacagtaatggagcttttggtgtaaaaacaagagctccatttttatatgaacaaaattcctctgtcatcgtagacagaaggtaagcgcttaatttttgggtaactacaaatttatccttttttcattcataatgatagaaaatagttttttactccatcatcttgataggaagtagatttttactacaattggaggtttcattatgaatggtaaacgtgctccaggccgttccctggatgaatggctggaactggtgacatcctgcaggcaaagcggtcttaccgatgctgcctggtgtcatgaaaatgggatttctcccagttgtttttacaatgctgtcagcaggcttcgcaaaagagcctgtgagataccagaaccatctggaaaagcaagcactctcgattttacatcccataaacaggatgtagtccggattgctatagagccggagcatactccggcagaactggtttcaatggaaaaaaaccgttcgctgtaccttgacaattcacatacgattgaaatcgaagcaaatggacttcggatccgcataagcaatgatgtccagccggttttattaaaaactctgatggatgtgctcagggagtccatatgctagcggatatctcgaatgtcgatgcaatctaccttgtctgtggaagaacagacatgagaaagtccattgatggtctttgtgccatcattcaggatcagttctctatggaaatcgaccatgcactctatctcttctgcggtagaaaatgtgaccggatcaaagcaatcttgaaggaaccggatgggatcgtcatgatctataaaagactgacagttcagggttcttaccgatggccacgagataaatcggaggtacgaaatcttacctggagagagtttgactggctgatgtccggcatcgatatcgagcagccaaaagcaatcagaacatcttaaaaagccagcttaaatctgcacacaaaagtgccggatttccttgtattttcggcacttttcaggcttttacacaccttgtttttctatgaaaatcctctgttttttggtataatagaagcatcagaaaagggaggaaaaagcagtgactaacagttccaaagaccttcagcttcgtgagctgaaagatatgatcacagatcttagaaacatgataaagacacttcaggcaactgtggatgctgccaacaaacgggaagaagctcttattcaggagagagacaatctgaaagacgagattagtcttctccgcaagaagctttttggttcctcaagtgaaaaacgtgtgattgattttcctggtcagttaaacctttttaatgaagcagagctggaacaggatccctcggttgcggagacagaagaacttgctgcaatacttccggaggaatctcctaaaaagagaaaaatcagagcaacagatgcagagcgctttaaagggataccagtaataaaaaaatatatcgatatcccggaagaggataaaacatgccctgtttgtaatactccgttggttaagattggcgaagagtttgtccggcgtgaactggtctttattcctgccaaactgaaagtcgttgaaatctacagttttaattatagctgtccggaatgcagtaaacgggatatccctgtcattaaaaagggaaaagacggaaagcctcatatgctttatggtatggcctcagctggtaccgttgcctgggtcatgtatcagaagttttgcaacagtctcccatactgtcgccaggaaaaagactggaaacagtacggagctgcaatcacccgtgcaactatggcaaactgggtaatccgtaattcggaggcatttttccgcccgatgtatgaatactttcatcggaagcttctggaaagagacttcctaatggctgatgagactcctcttcaggttttgcatgaagaaggacgtcgtgctcagacaaagtcctatatgtggttgttccgtagcggagaagacggtggtatcccgattattctctacaagtattcaccaacccgcgccggagacaatgccgttgaatttcttcaggaatttaacggctatctgatgtgtgatggttacagcggatacaataaagtatcaaatgcaaagcggacagcctgctgggcacatatcagaagatacctgacagatgccattccaaaaggaaagcagctggattatacccagccttccgtacagggcatgatgtatatcaatcagctctttcatctggaagatgtcattaaggcaaagcactcatccttcgatgctatcaaaaaggccagacttgagaaagaaaagccgatagtggaaggctttttgtcgtggcttgataaacagaaccctgtcaaaggttcgaggatggataaggctgtaacatatatccagaaccggagagactatcttatgacctatctggaagatggacgatgcagtttttctaacaatctcagtgaaaatgcgatccgtccctttacagtcggccgcaaaaactggctgttctgcgatacacctcatggtgcccaggccagtgctatagtatatacgatggtagagatggccaaggcaaatggagtaaatgtctatcactatttaacctatcttctggaaaagctgccagatgatagtatgagtgacaatgaattagatcaacttgctccatggaatgaaaaggtaaaagctgagatagggcgtcgagcagaaaactcaaatcaataataaatcatatgtgaattatcaaggtattccggttgctgaaaagtagccggatatttttctatcaacggctgaaatctaagcgcttacgatgatggttcaaagttacttttaatatatgataatgaatgtatggaactttatagtatagaagaaattctttgatgaaatggtgatagaatatgccattaaaaagagaaggagttaagaatttttttgaaaaagcacaataatatatttgttatagtaaacgctttgtagtgattaggagtaaacgtcaaatcatacgcctgacgtcaaaataaggggctgtcgcactaaataattagtgcgcagcctcttttctatgcaaaaaattacagccaggcttcgaaaagcctggctgttggtgtaaaatataagtatgcaaacccctatattattacacaagaattatactttgaatgaggaaggatatcaactaaaacttcctttaaacttagaaacaattattccagtagatgattctgtgcggttgctgagtcagtttgtggaggctatggatttaacggacttatattctacttatgaaagaataaatacagtatcgccaagaacactcttgaagattgttttatattcctatatgaatggtgattattcctctcgctctatggaattgaactgtaagcgagatattaatttcatgtatcttttagagggaaaaccagttcctgaccatgccacttttgcccgtttccgaagtattcattttgctccgtgtgcgaaacgaattctcgctgaaatgtctaatctcctttacggacttggagaaatttcgggagaaacgatttttatagacggtacaaaaatcgaagcctgcgccaataaatatacatttgtatggaaaaagacggtaaccaaaaatcaggcgaagttgctgattaaaatcgccgatctcattgcagaatgtgagcaactttatggtattcggattgttcacggtgatactgttaaaatgaaacacgtaaaacggttacgcaaaaagctgtacgcattaaaacaagaagaaaacattgtatttgtacatggtattgggaaacgaaaaactcagctgcaaaagagtatcgaaacattagaagactatctggaccgtttaaaaggatatacaaaaaaactgcatatttgtggaaaaaggaacagttattctaaaaccgatccggatgccacctttatgcggatgaaagaagatgcaatgggaaatgggcagttaaagccagcatttaatttacagcatggagttgattctgaatacattgtatggctgacaatcggaccacagcccacagatactaccaccttaattcccttcttaaaggaaacagaagaatatctgacatttaagtatcaaaaaatcattgcagatgctggatatgaaagtgaagagaattatgtatttctagatcaaaatcagcagttggcatttatcaaaccatcgaattatgaaatatcaaaaaagagaaaatataaaaacgacatcggccgtatagaaaatatgaagtatgatgaaaaaagtgactcttatatttgtaaaaatgggaaacagctgccctttacacatctccgtcgctctaaatctaaaactggatatatcagtgaaaaaaacatttatcaatgtaaagaatgtaaagattgtccttacaagaaagagtgcatcaaggggaataactgtaaaacaccaatagaagagcgaaacaaagtgctttccgtagcaaaaacatttttgaaatatcgggaggaagatttggagcggattctttctgacgaaggaattcttcttagaataaatagaagcatccaagcagaaggatcttttggtgaactgaaacaggatatgcagtttcgcagatatttgagtcgtggcacagcgaatgttcttgctgaaagtgttttgctggcaatggcaaaaaatgtaaataaacttcataacaaaatccaaaaagggaaaactggaaggcatttatttcctttgaagagtgcataaatttagagaatccgaaatttttttcaaatccagttttggattgtattaaagtacggcttttttacgaaaaagctatcgtttcaatagaaacagagcaactatatagcgaaaatcagaaaaaaggaagctgccgcttcacgatttactaatcgttaaagcgacagccccggttttctacactcctctggaagtttgtctgaccaaggcatcagatcatccagtttcgtagaatctatatttccttgttcatcacagaaattcggtaattctgtgagtatgtatttaaagtagtagtacgggcgaagatgattcatgactgccaagagcttttagtttgaatcgtcttcggagactgctgataatccgagctgttctctcgtttttgcttcgtcctctaaacgcagcctcctcagttcttttaaaaatgcattctctatccttaattttagaagttcatcttccagttctcttacatgctcagcgcttgtatcaacggaagtttcttctaatggtttactttgcgtagtgttatctgatttatccaatgttttctttcgacctttcttatgtggtctcaacgcgtcaggaccagctgcgtgaaagcgattaacccagttaacaatcaaagatgggttggtaaagggaacatagtttatcagctagactttacatagagagaattataaaaaatggttaaaatgataagaaagggggagagagtaaaaaatgaagaaaagaaaagttagaatcttggttgctataatactaatggggatagtagtatatgtctctccaccgattatgtttgttaaaggcgcacctattttaggaaacaaatgtagttcttataaagaaaaaataggtaaaaagatatattatgctacagatttcgagaatttttacattttaaatctgaagttttgggaaaagctggaaatagaaaggttgtttgcaaatgaaaatcatagtattcatatagaaaaaaaacttcccgtactttatacgataaggcatattccaaatgagaatgactcatatagcttccgagtaaaaagaatgacgtcatgctggtattttgattattatgcaaatccgaattccccaatttggagataaaaaacatttaaaatattgtataagtatccttgcaacagtgtacaaagggaacataataaaaaacttaataatggaccgccgatcttacatatgataccgccctatcgagactatgggcggtatttttgtatccaggcagggaaaggaggaatcatgcgaccgggtctgatgaaacatcaggttcattttttatacccaaaacagggtaagcgcctaattttagggtggatggcatcaaccagatattcattctataatgattggtaggaaatgcaggaatgctagcattttacgctatttctaaaaggagtcccatcattatgaataaacgagtttgtaaagacgatcaaataaaacttatcatggaatgccgctaaagtgaatcttgattatatatcgggtatttgcatagtacttggtgtgattaacgttttggtatggaaaagaggaatgaaggcgtatcagagtgcaggagcgtaataatctgcatatggggcatatctaaatggacgggcttgcggagcaaaacggccgaaatgcgaagctgaacggtcgcatcacctttgattattagtatagccgcagcgataataaatgtattcattcattagatgaaaaaacatttattttagaaggataatgtatgcaagactacaaggacatcattatcaaacattatgcgctttctctttcaggaagcgagattgtccgacagctgggtgcaagtaaattaggggtgaatgactttttaagagaataaatgacagaaaaaacgtaacatcattcaccggctcttagaaaaatacgatatccaatcaacggaagatatccaggacgctctgaaagatcttcttgacggtggaaaggagttggttcatttgataacaacaaaataacttttagaaagtgtcatttgcaattgcgtggcgattttttatgtctaaaagttgcaaagaaattctattgaaataggagtaattactcttgaaaatgtgtatagaatcatgcagaaatttgtcaagctatatgctataatgagtgacgaggaaaaaagcattcgtactttatccaccatattacaggagtttaattcaccattatgcaacagatcaacatgaaaggttggaaaagtacaatgagatcaactgatgcagacagatagtaaacgaaaagaaaggggttcatagcaattgaagattagaacaagcgaaaatgcacatgattttcaaaccagattgtttcatcgtctgaatgcatattcactgcaggggcttctaatggatgatcagcacgaatttactgctgctattgaagcagttgaatatgaagatggagacgataaaacgaaggttccatttacacgaagagaacttcacgcacggtatgttctggcttgcgaggtgggaattccattgtatatattgtgttatgtggatgggatatacaaaataatacgagtcaatgaggaaagaaatcaggttgtgctcaggttggacaaaaaattgaacgaaaacgaatttatacaatggtggggagaacggaagaagacagtgcagacgaaaccacttaataatggcggggaagaaagactcggagaaacgatattcgacagagtattaagaagacatggatatgaatggggcgggaatatcgatggatttgttttgactgaagatggtcaggcagtgaaatatattatagataatatatctgtaagcaggcctaatttaaatgacgaaccctcacactacttcaacagtcccaatccaaaacatggaccgagatatgaggggtggtatgcagcagtaaagcttgcaaatcagatacatgttcctcacgttttgtttacgatagataagcgtgatgagaaaaaagagcatatagggtttactgttatggacaggcttacaccagatggaatcttctacgctggaaatataaagccaaacagtaatattattgaagggatggaacacatagtagatatcgtaacagagcgtgtgaatacagcatccccaccggttttggtggaaaagtctgaagaatgagaaaagcggaaaagggaggatagctgtcatggaaaaaatgcagatgaagtccaagaatatgataaaggaaaacatggaaaagctttgtgagttatttcccggatgtcttgtggagagtatggatcagaatggaaaggtatcgaaaaggattaatctggattacctgaagcaatttttgacggatgaactcgtggcgggagatgaagtctatgagctgaattgggcaggaaaaaaggcggctattttggacgccaatcggtctgttacaaaaacactgcgtccccggaaggaaaagagtgtacagtgggagactactgaaaacttgtatatagagggcgataatctagatgtcttgaagttgctccaggaaagctatttatctcaggtgaaagtaatatatattgatccgccttataatacggggacagactttatttataaagatcgttttgaaatggatgcagatgattatgaacagagaataggtgggtataacgaagagaacgaaaagctttttaagaacacggatacgaatggaagattccattcggattggtgttcgatgatttattctcgcctgttgctggcaagaaatttgttatcagatgacggagtgatttttataagcatcgatgatcatgaacaggacaatatgaaaaaaatttgtaatgaagtttttggtgagaataattttcttgcacaagtggtttgggaaagggctttttcgccggtgaatttgaaaaagcacttttcggaaagccacgactttattctttgttacgcaaaaaatattcgctcggctgtttgcaatggactgccaagaggtggggagagcgactcacgatataaaaatccggataatgatcccagaggtccctggacatcgggggatctttctgttggacctgcagtagaacaccgcatatatgagattatgacacccagcggaagaaaggtaatgccgcccagtgggtattgctggagactcgacaaaaagacgtttgaacagtataaagcagaaaacagaatatggtttggagaaacaggagataacgtaccaagaatcaagaggtttctctcagaagtaaagaaagggattacccctatgacagtgtggaaatatacagatgttggcagttcccaggatgctacaagggaactgaaaaaaatatttgacggaaaagccttttttgattatcccaaaccggtagaactgatcaagagatgtgtggaactgtattcggatgatgaatgcattgttatggatttcttttcagggtctgcaacgactgctcaggctgttatggagctgaatgcagaggataacggacacagaaagttcataatggttcagtgcgatgagaataataagaaaaacggagaggcctataaagcaggctacaaaacaatttgtgatatcggtgaggaaaggattcgccgggtcggagctgccataaaagagaaaaatagaacagtcgatacgggatttagggtattgcacctggatgaatccaatatgactgacatttactattcggcagaagagtattcccagaatttactttcattattggaatccaatatcaaacccgatcgaagtgcagatgatttgctgtttgggtgtttgctggagtgggggcttcctctgtctatgccgtataagtcagagcaagttgatggttttacaatacaaacttataatgggggagatttaattacgtgctttgatgaaaatatttctgatcatgtagtaaaaatgattgcaaaacgtcagccttcccgcgcagttttccgggacaagggatttccgggaagcccggaaaaaatcaatgtaggagaaatttttaagatgttatcacctgatacaagagtgaaggtgatatgacaagggggatccgatgaaaatacagtataagcatcaaaaatttcaggcagatgctgcgaaagctgttgtggatgtttttgcagggcagccgtatatgacaccgacgtatagaatggatagcggttctgggtatatccagcaaagctttacagatgatattgattttaccgggtggagcaactataaaattgttccggagctgaatgatcagttgatcctcgaacatttgcaaaaaattcaaagggcgaatcagattgagccttcaaaaaagttagagggacgtgaggacgggttcaatcttactgttgagatggaaacgggagttggaaagacgtatacgtatattaaaacaatgtacgaactgaatcgtgcgtatggttggagcaaattcatcgttgttgttccaagcattgcaattagagaaggggtgtaccagtcttttgagatgacgcaggagcattttgcggaagaatacggaaagaagatccgtttttttatttataattcctccaggctgacagaaatagaccgttttgcgtcggatagctccatcaatgtcatgattatcaattcccaggcatttaatgcaaaaggaaaagatgccagacggatttatatgaagttggatgaatttcgctcccgcagaccgatcgatatcattgcgaaaaccaatccgattataattattgatgaaccacagtctgtagaggggaaaaaaaccagggaaagtttgaagcaatttcatccaatgcttacgcttcgctattcggctacacacaaaagtgacaggatttacaacatggtctatcgtctggatgcaatggaagcttataacaagcgtctggttaagaaaattgcagtgaaaggcatcacggaaaccggaagtgcagcgacggatagttatctgtatcttgaaagcatcaacctttctaagaaaaatccaacagcatcccttcagtttgaagtaaagctgaaaagtggaattttgaaaaaaaagagcaggattgtttcagaaggagacaacctttatgactattccaatggactggaagaatataagcatggatttgtcgtaagccgtattgacggacgagataactctgtagaatttataaacggcatccggatatttgccggagatgttgtgggtgcagttgatgaagatcagcttcgcaggatccagattcgggaaacgattctgtcacacttgcagagagagcgtcagttgttttataaaggaatcaaagttctgtcgctgttttttattgatgaggtggcaaattatcgggaatatgacgctgccaatcagccgattaatggaaagtatgcggtcatgtttgaggaagagtatgaggatatcatgaacaatctgcaattttcggctgactgggatgagtatatccattatctccagtcgatacctgcaaaaaagacgcatgcaggatatttctctgtagacggtaaggggaagatgatcaattctaaagtcggaaggaaggagacaacctctgatgatgtcagtgcatatgaattgatcatgaaaaataaagaactgctgttagaccgtgatccggtgagatctccggtgcgttttattttttcccattctgcactccgggaaggctgggataatccgaacgtctttcagatctgcaccctgaaacagagcagcagtgatgtgcgtaagcgtcaggaagttgggcgtggacttcggctttgcgtcaatcaaaaaggggaacgtatggatgtcaatgctctgggcagagatgtgcataatgtgaatgttcttacagtgattgcaagtgaaagctatgattcgtttacaaaaggtcttcagacggagatggcggaggccatttctgacagaccgacagctgttacaaaagagatttttctagataaactggtggaagatgagcaggggaatcacgttgtgatcacaaacgatgtcgcatcagcagtttattttgatcttattgtcaatggatatatcagtaagctgggagagcttaccgataagtattacgaggatagagcaagcggagaaatcaaagttgcagaagaagcaaaacacattgcttcgggcatagtggagattctggattctatttacgatgggaaagcactgcagccggagaatgcccgaagtaatacggttgagctgcaggtggatcatgagaagcttaacagtaaagaatttcagtcattgtggtcaaagattaataagaagtccgtttatgtggtgaattttgatccggaagaactgatcaaaaggtccattgcttcactggattccaggcttcgtgtcactaagatttattttcgggtagagaccggtgcaatggattccatccaatccagagaaaaattgactgcaggctcagtctttgtgaaagaaaaatccggaaattatgaaagagcgacagcagcgcattccaaagtgaaatatgatctcatcggaaaactggtagatgagaccgggcttacacgtaaggatattattgcgattctacagggaatccagccgttcgtatttgaacagtttcaggacaacccagaggaatttattgcgaaggcagctcaactgatcaatgagcaaaaggcaaaagcaattattgaacatattacctataaggtgttggatgaacaatatgatacggatatttttacaaatccgacgatcaaaggaaagttgggggtcaatgcgatgaagacaaagaaacatctgtatgatcacatcgtatatgattcggccaatgagcgtgaatttgctgcggatttggatacagatacaaacgttgccgtatatgtgaagctgccggatgaattctatatctccactccggtaggacattataatcctgattgggcaattgctttttatgaggaacgggtgaagcatatttattttgtagcagagacaaaggggtcgctggattccatgcagctaagactaatggaacaggcaaaaatccattgtgccagggagcactttcaggcaatctccaaaggcgatgttgtctatgatgtggtggacagttatgcatcgttgctggagaaagtgatgaaataaacaatgagacaatcggttgtttatcagggattagagttgttgtgacagagtatggaaatggtatacgaacggagaaaatgaaagatggaatatatagcacatatcgatgaaacagagaagaaaagaatacagacagtgaaagaacatttagaaggaacggcaaaactgtcagggaaatttgcagaaaagtttggaaaacaagaatggggatattgctgtggaatgctacatgatataggaaaatattctgaagattttttgaaaagaatcacaggggaaagtaactgccgggtagatcattcaactgccggggcaagagtctgtgtaaaaaaaggtggaaagtattcctttttagagtattgtattgcaggacatcatgcaggactgccagattatggaaataattatgatgaggcaggagattcgacgctgcttggaagaagaaagaaaaaaatcagtgattatcaagtctatcagacagaaattgaaattccggagataacctctagcccaattgatttaaaaaagacacaaaatcccgatttttcattgagtacttttatgaggatgattttttcgtgcttagtagatgctgattttctagatacagaggcatttatgaacaagggaaaaatagaacgaaatccaggagaaagtatggaagtgcttcttgagaaattggaaatatatacatctggctggctgcaaaatcaagaaacagataccgtaaacggaagaagaacagaaattttgcgacattgcttaaaaatgggagaatctgaaaaagggctatttcggttgacggtaccaacggggggtgggaaaacaatcgcttctcttgcatttgcattgcgtcatgctgtgaaaaataaaatggacagagtaatttatgtgattccatatacaagcattatagaacaaaatgcaaaggtgtttcaggacattttagggaaagaaaatgtgttggaagatcatagcaatgttgattataagagttcggaagaactggtgacgatgcagcttgcagcagaaaattgggataagccggttgttgtcacaacaaatgtgcagttctttgaatctttgtttgcgaataaaccatccaaatgcagaaagctacataatattgcgaatagtgttattatttttgatgaagcgcagatgctgccaaatgattatttaaagccttgtattgcgatggtggaagaacttctaaataattatggaataagtgctgttttatgtacagcaacacagcccgctttggaatctttttttcagagagaaagatctgcaatagaattatgccctagaatggaagaacagtttacgttctttaagcggacagtatttgagaacataggtgtgttgacagaagagacaattgtagagagtctaaaggaagaatatcaagcactttgtattgtaaatacgaaaaaaaaggcacaaaagctttacaatgcattagaaggagacggtatttatcatttgtccacgagtatgtatccgaaacatagaaaacgagtattgggagaaataagagagagacttcaaaaaaataaaaaatgtatcgttgtttctaccagtcttgtggaagctggggtagatttggatttttgttctgtttatcgagaacttgccggggtagattctatgatacaagcagcgggcagatgcaatagagaaggaactcgaatagcaaaagagagtaaggtgtttatttttagatttgaagggaaacagaatcttttggggcaaaggcaacaaattgatgtgacgaaaagtttgattgcagagggcagagatctttctgatgtgaaaagtattaaggagtattttgaaatgctgtatcatctgaaaggagatagcatggataagaaaaaaataatggaggagtttaaaaataaacgatataattttgcaaaggtgggaaaagaatttaagttgattgaacagagcacaaagacaatttttgtgaactgtgaggaatcagcaaatgaaattctccatatgttaaaggaacgaggatttacacgttctggtatgagaaaagccggtcagtattgcattgatgtatatgatcaagaatttgataaattgtacggaatgggaatgattcaacctgtttctgaagatatagaagacttttatgagttgactgacaggagtaaatatacagaaaaaataggactggaattagaatttgacgatggtgtggcactatttttaggataaagatagtgaaaaacaagagaaacggtggatatgtgaaaacataaacaccgtttcaatgtaagaagttaaaaaatttattattttttcaatccccagatatttatctgacacgaacagtgtatcataagaaaaataaaatttcaataataaattatataaaagaatatattgattttggaagacgggtatagtatagtgaagatataataaaaaatcagaggtggtagaatgattttatatcatggcagtaatgttctggtcgaatatccggaaattcgaaaagcaaaatataacaaagatttttattttggattttactgtacaaaatatccaggccaggcagaacgttgggcaactcgatatgggaaaaatggatatattaacaagtatgaatatactgcaaatgaaaatcttaattatcttgtttttgataaaatgacagaagaatggcttgattttattgtggcatgtcgtcagggaatatcccacacgtatgatattgtagagggacctatggcagacgatacaatctataattatatacaaaattttatggatgggaaaatatcaagagcagctttttgggaattggtaaaattcagctatcctacacaccagattagttttcacacaatttctgcacttgatacattaaaatttataggaagtgagattgcacatgggaaaaaagaataacaatgctttgttttttacatgtagtctgattgagtatatcggaagaaaggtaaaaagaacaaggagagatgtagtagaagcactgggaaagggacgggtagagcgtatttatgaatatgcagatgtgttccactgtgaaccgatagagaaagtggcagatgaatttatagaagaatgtaaaattgtaagtggggtgtttgacaatgaaaaagaatgcagatatttagtgccggattattggagtattggtgaggtatatgagagattgattgaggattcttatatggataatgagatcgtaaaaggtatttgggaagtgtaccattcatggattgatgagcacatttcagattataatacggatttttattatcaaccgagagactatatagcagcatgttatgcggaagggagagtcttataatgaaaagaaaggagggaacaggaagatgggaatgggtgtaaaagtgaaagtctggggagattatgcattattttctcgtccagaattaaaagtagaaagatactcttatgatgtgatgacaccatctgcggctcggggaattttagaagcgatttattggcatccgggaatgaaatggattattgataaaatatatgtaaaaaaaccaatttgttttacgagtgtcagaagaaatgaagtgaaaagcaaaatttctgcaaacaatgtcttgtcggtatataacggagtcaggaagccactctatattagcagtaaagaagaaattgtccaaagagcttcggtcatcttaacaaatgtagagtatgtgattgaagcacattttgaaatgacaaaaaatgcaaatgagacggacaatccaggaaaatttaaagacattgttatgcgacgtttgcgcagaggtgaatgctatcacatgccatatttcggatgcagggaattcccggcacattttgcattatgggaaggggataaagtggaaacagcatacgatgatgtaccagaaaaagattttggattgatgttatttgatatggattatacagatagagataatatttgtccgatgttctttcatgcagttatgaaacgaggggtgattgatttacagaattgtgaggtgatacgatgatcttaccagcgttggtaaaacactatgaaaatttagtggaacaagaaaaagtatcaagacctggatggtgtagtgcgaaagtttcttaccagattgagttatctggcgatggaaaaataaaaggaatttcttgtttgaaacgagaggaagaaatagggaagaaaaaggtaatactgcctcagacgatgtctgttccagagatggtaacaagatcttcaggggtttctgctaattttttgtgcgataatgcgaaatatttacttggagttactcaggagaatgacgaaaaaagtaagaagagagcggaggaatgctttcaagctgcaaaagagaaacatctttcattattaagaggagcagagggaggtatggcaaatgctgtcttccgtttttttgaacaatggaaccccaaaacagccctggagaattcagaaatcaaagaaaactgggaagaaattacagatggaggcaatttgatttttggaatgggtaaaaattatgctcaagatgattctgaaattaagaatatatggaacaatcgaacattagaaaaaagtgaagagattcagggagtttgccttgtaacaggaaaaaaatcagaaattgcaagaatacacagaggaataaaaggagttccaggagcgcaatcaagtggtgcggctttggtttctttcaatgcatcttcatttgaatcttatggtaaagagcaaagttataatgcaccagtgggaaaatacgcagagtttgcatatacgacagcgttgaactatttattatcagaaagaaagtattctcttaaaattggggatacaatggttgttttttgggcagaaaatgggaaagtggagtatcaggatacatttctggaatgtatggatccgccaatagataatcaagaggaattaagaggtttgtttgaaagaatacgaaatgggaaaccactggagattggtggaaatgaattaaatcctgaacaaaaattttatattttgggattggcaccaaatgctgcgcgactttctgttcgattcttttatgaaaattcatttgggaaaattttgaacaatattttggcacattataatagaatgaagattgtacgacccaaatgggtggaaaaagagtatttaggtattggagagttgctttttgaaacagtaaataagaaatcaacagataaaaaaccggtatcgaatatgtctgcaatgacttttcgtgctattttgtcaggcgacagatatccggccaggctgtattcggatatcatgatacggattcgggcagaacaagaggaaggaaaaattagttggaaacgaattgctattataaaaacctatctaatgcataattgtaaatggaaagaaggggaggattatatgggattaaacgaggaaagcaatgatatagcatatgtacttggaagattattttctgtattagaatcaatacaggcagatgcaagtccgggagtacaggcaacgattcgagatcgttattttaactcagcatgtggaacgccagcttcggtgtttcctattctaattaaattgaaaaatagtcatttgaaaaagataggacgtgaaaaagaaggaacaaagaaatattatgagaaactttttaccgatattatgtggaaaatagatgcacgggagggatttccaaagaggttatccttagaggaacaggggaaatttgcgattggatattatcatcagacacaaaaaaagtatgagaaaaaggaggaaaaataaatgagagaagtgattaaaaacagatatgaatttgtagtcttatttgatgtggagaacggaaatccaaatggagatccagatgcaggaaatatgccaaggattgatcctgagagtgggcttggtttagtaacggatgtgtgtctgaaaagaaaaatcagaaattatattgaaacggtcaaagaagatgaagaaggattcaaaatatatataaaggataatgttccgttaaatagaagtgatcgagaggcttgtgaaagtttgggaatcaaggaaacagatgacaaaaaggtgacagaatccttaaaaaaattaaagaaaagtgatacagatgctgatatgaaaatcagagattatatgtgtcagaatttctatgatatcagaacatttggagcagttatgactacatttgtaaaggcagctttgaactgtggtcaggtaagaggacccgtacagattggatttgcaagaagtgtagatccgattatcccacaggaagtgacaatcacaagagtggctattacaacagaaaaagatgcagaaagcaaaagtacagaaatgggaagaaagagtatagttccgtatggattatatagagtggaaggctacgtgtctgcaaatttggctcgcaaagtgactggatttacagaagaagatctcgatttattgtgggaagcaatcatcaatatgttcgaacacgatcattctgctgcgagaggaaatatggcagttcgggaactgattgtatttaaacatagcaaagaattaggagactgtccggcatataaactgtttgattcagtggatgtgagaaaaaaagatgaagtggaatatccgcgaagttatcaagactatattgttgaggtgcatgaggaaaggataccggattctgtagaaatgaaaaggatgatttaatggagtattcagaagatgattacttgatgttgtcaggtattcagcattttaaattttgcaggagacaatgggcattgatccatattgaacagcaatgggcagaaaatgtccatacagttgttggagaattgatgcataagaaggcacatgatccatatcttgtggaaaagagaaaagatgtgcttatagtcaggtcactgcccgttgtatcaagaacaatgggaatcagcggagaatgtgatgttgttgaatttcataggtgtgaagatggaatcaaactatacgggcacaggggtctgttttctgtttatccgattgaatataaaaagggaaaatcaaaaattacggatgaggatcgacttcagcttacagcacaagtattgtgtttggaagaaatgttttcaactaaaattgagcggggagcactattttatggagagacaagaagacgtgaggaaatagagattacagaggatttacgacaagaggtaatccacatgctttatgaaatgcatcaatatttcgatagaaaatatacaccgaaagttaaatataataaatcctgtcaggcgtgttctctcagagaaatttgtttacctaaattaggaaaatctggttccgtaaaaatgtacattactcagatgctgaaggaggacgaggaatgaaaaaaatattgaatacattgtatgtgacctctgaagacagttatctggcattagatggagagaatattgtagttcttgaaaaatcgacagaaattgggcgcttgcccttacataatttagaaggaattgtttcttttggatatagggggacaagtcctgcgcttatgggagcatgcgtagatcgaaatatttctttatgctacatgacacctcaaggaaaatttttggcaagaataactggaaaagtaaaaggaaatgtgatattgagggaacaacagtacaacagtgcgaaaagtgaggaacaaagtcttgaaatagcgaaaaactgtattttaggaaaggtatataatgcaagatgggtgttagaacgtgcagttcgagatcacagccttcaaattgatgtagatcgagtaaaaaatgcatcggagtatttaaaaaaatctttgagttatcttcagaacagccagtcaaaagaacagctaagaggatatgaaggggaagcagcaagtatttattttggtgtgtttgatgaattgatattacagcagaaaaaagaatttaaatttcaaggcagaaataaaagacctccaatggataatgtaaacgcattattatcttttgtgtatacgctgttgaccaatcagattgcatctgcgctggaaagtgttggattagacccatatgtgggatatcttcatacggaacgtccaggcagagcgtcattggctctggatttgatagaggaattaagagcagtattggcagatcgatttgttttgtcactgatcaatagaaggataatttcaggaaaaaattttgtcaaaaaagaaaatggagttgtattgatggatgatggtctaaggaagaagcttctgacagaatggcagaataagaagaaggaaacattgacgcatccgtatcttaaagagaaggttgaatggggaatggttccttatatacaagcaatgcttttggccaggtatttgagaggcgatttagatagttatccagtatttctctggaaatgaggcggaaaaggatgttggtgttaattacatatgatgtgaatacagaaacagcagatgggaaaagaagattacgtaaggtggcaaaacagtgtgtaaattatgggagaagggtacaaaattcagtatttgaatgtattctggataatgcacaatgtatcaggcttaaagaagcattggtggatatcatagatgaagaagttgatagtctgagattttattatctgggaaatcaatataaagcaaaagtagaacatataggtgtggatcacggcatcgaagcagatggcattcttatcatataattggagtgcgaattacaagtaaacataagaatacagagagattcgcaccagaaaaaatgtacaaaatgtattgaattgggaataatttgaaatgcgacaatgaaaaaagaaaaagaaattgataaaatttggtgatattggaaaaacataaagcactaaatttagataaaattgctgtcgctcccctcgtgggagcgtggattgaaataatttggaatcggtacttatccaaaaaatgtgctgtcgctcccctcgtgggagcgtggattgaaatcgcgaatatatcaagcttttggacatgttaaaaggtcgctcccctcgtgggagcgtggattgaaatagatgcggtctggaacaaagaagctgttgggaagtcgctcccctcgtgggagcgtggattgaaatgccaaatctacagcgagttccttgtttgatttatcgtcgctcccctcgtgggagcgtggattgaaatttccattactatacggaacggagaaactgtcttgcgtcgctcccctcgtgggagcgtggattgaaattcctttcgtgttaggttgtttaaggtgtgtaaccgtcgctcccctcgtgggagcgtggattgaaatttacaatctcccttgctagaatcaaaccttgtgatgtcgctcccctcgtgggagcgtggattgaaatcccggtaagctgtgatactcccgtcataaccgcgtcgctcccctcgtgggagcgtggattgaaatttgttctgtacttctacaatccggtaacaagctctgtcgctcccctcgtgggagcgtggattgaaatatctttcgccgtgattctacgggattttagcgcagtcgctcccctcgtgggagcgtggattgaaattcgtattttttaccgccttaaaatcggcggcagctgtcgctcccctcgtgggagcgtggattgaaattaaattatagtccgaaagcatatctgcaaagttgtgtcgctcccctcgtgggagcgtggattgaaattgttttagaaacagatttccactcatccacgaacgtcgctcccctcgtgggagcgtggattgaaatgttgtttaatgtagcgatcgaagcctactaaagcgtcgctcccctcgtgggagcgtggattgaaatttgtaacaccaatacagttagatggctattgcagtcgctcccctcgtgggagcgtggattgaaattttgaatactttgtcaatagtttttgtttcgtttgtcgctcccctcgtgggagcgtggattgaaatttaatgaaaataatcatgtagtgtcagcatgtttgtgtcgctcccctcgtgggagcgtggattgaaattttgtattccgttgattttacaggatcagcaaatgtcgctcccctcgtgggagcgtggattgaaatactaaatatacataataatttataaaatagatgtgtcgctcccctcgtgggagcgtggattgaaatagaagcctactaaagctaagcataaagtaaggaggtcgctcccctcgtgggagcgtggattgaaattccgattggagatgctgctactacaattaccatagtcgctcccctcgtgggagcgtggattgaaattctgctgtggggtaatcgtagaactgtccgctgaagtcgctcccctcgtgggagcgtggattgaaatatacaatgcctgtgcggttgctaatgtgacggatgcgtcgctcccctcgtgggagcgtggattgaaattcacaacatacttgcgatttgacttatttgtaagtcgctcccctcgtgggagcgtggattgaaattcacaacatacttgcgatttgacttatttgtaagtcgctcccctcgtgggagcgtggattgaaatagacgggcagccgataaaaaagtgggatggaaaagtcgctcccctcgtgggagcgtggattgaaatcgtcattaaatactcattatcatcacataaaatcagtcgctcccctcgtgggagcgtggattgaaattttatcgtatgcaaatattgtatgcgccaaaaattgtcgctcccctcgtgggagcgtggattgaaatgccgtatcacgctcttttaactcatgcatctcgtgtcgctcccctcgtgggagcgtggattgaaatatttacaaacttctccttttcgtctacaatttaagtcgctcccctcgtgggagcgtggattgaaatcatatatggaaactacagggaaatactggaaatggtcgctcccctcgtgggagcgtggattgaaatattttacgtcctccttaaaaaagcattgctgctacgtcgctcccctcgtgggagcgtggattgaaattccaaagtcaaagtccgattccatgaaatcttcagtcgctcccctcgtgggagcgtggattgaaatgcgttaccaacacaacattattttaccagttccgtcgctcccctcgtgggagcgtggattgaaatttatctgtttttgcaattacaatatcgtacctttgtcgctcccctcgtgggagcgtggattgaaatctcgatacaatttgtttttgagttttgggagtccagtcgctcccctcgtgggagcgtggattgaaattacgtgattttagcgcaattacatctctgtaatgtcgctcccctcgtgggagcgtggattgaaattcaccaacaaaagaaacacaggaaggagaaaaggtcgctcccctcgtgggagcgtggattgaaattgccgaaaagacattggccaacgaaaacaatcttgtcgctcccctcgtgggagcgtggattgaaattttattctaagtatcagaattgcgggtatgtacgtcgctcccctcgtgggagcgtggattgaaatgtctttccagtagtgcatggacttcttgtgtgcgtgtcgctcccctcgtgggagcgtggattgaaatacaagaataatctgtctgattattgcgatgttaggtcgctcccctcgtgggagcgtggattgaaattgaattaggagtagttgatgaagcaatagctccagtcgctcccctcgtgggagcgtggattgaaatctgaattttggaagtcgatcacgatacaacaccgtcgctcccctcgtgggagcgtggattgaaattaaagcagtcgatgggaatcagctatacaagtcgtcgctcccctcgtgggagcgtggattgaaatctatgtgttaatataggaaatgcaaggaggaaacgtcgctcccctcgtgggagcgtggattgaaatcattcggttcatgccagggtatgtaattggaccagtcgctcccctcgtgggagcgtggattgaaattcctagtttgaaaacaaaaataaaatctatgttcgtcgctcccctcgtgggagcgtggattgaaatagtcgattactgtcaatatcctctttctcatcttgtcgctcccctcgtgggagcgtggattgaaatttgcactttccatccttgtacgctacgcatcgctgtcgctcccctcgtgggagcgtggattgaaatacctactctacgatctgataccagccctctttctcgtcgctcccctcgtgggagcgtggattgaaatacagacggtgatatttacgcatctctggaaaggggtcgctcccctcgtgggagcgtggattgaaattgttttaacatcttcatttccataaggtgaaaggtcgctcccctcgtggaagcgcgtggattaaatggctgtatagaattagaaataccatagtatactcgctactctcttcgagggataaaagaggaaacaggatttacaatgttgaatccacagatttgtgggtttaaagatgggatcgaagaggatggggcaagataccttgtgattttgcataaaacaaaccaatttacaggaaagttaaaatcatcagagaaaggaaaagaattttgggtagccagggaagaaatggatagtttgaacctgatatggaatatgagagaattgctatgacaggtttttggaaagtagcacaattattgtacccaacactatctgtcggactatcgatttgtaacgattgtcagcaggtatcaggtttttcttatgattcaaagaagaaagacagattgtcagatcttagatgtatactaacaatgaagaggaggaaaatagtggaaattataaaggcggtgggactgaaaaagtactatattacagatacatatgaagtacacgcgctggatggggtgacactttctgtgcaagagggagaatttctggcaattgtgggaacatcaggcagtgggaagacaacgcttttgaatctgcttggaggtctggacgtgcccacagaaggaggtgtctggattcgaggaaaaagtctgaaagatatggatgaagaagaaagaaccatattccgaaggcgaaatatcggatttgtattccaacagtacaatttggttccggtgctcagtgcgtatgaaaatatcgtacttccactgcggctggatggaacagcggtcgatcaggaacttttggaggagatcgtgacgatgttaggaattcggaatcagttggagagactgcccggaatgctttccggaggacagcaacagaaggtggcgatcgccagagcactcatgacaaagcccgcggttgtattggccgatgtaaactgaaccccatgtgcttactgtacatagcgtgtacacagtaggattacatgacaatataggtacatgatacacaagtaatgagaaaaaatgtgtatggagtaggaagaaagtattgatatctggtatgaggaaagacatccttgtagcaggttttttattgtctataatagacaggtataaaggtaatattttagtggtatgtccgaatagcttttttacgataagtgggtatactggtgtggtaaagagaagaggtgatgactatggcgtattgctatgatgggaaaacatatgaaacgataaaagaaatggcagaggaatatggaattgaccgtcaaagaatatattccttccggcgccgaggctggtcgctagaagatgcaatgcaaatgtgtgtcaatgatgtgcgaggaagagggcgactttttgaatacaatggaaagttatatcgttcgcctaaagcgttggctgaagaatatggattaccttggaattcattagcacattacatacaaaggtgcaaaacagtagaagaagcggtagatcgttgcaaagaggcacaagagaagaaaattatgctatggggcaaaaaatatcagagcagatatgaggtggcaacagcatttggaattagagagacttccatttcagccagaatccatacaagaaacaggacattagaagaaattgttcttgaactattgcagaaagaaccgatatgttttgaaggaaaatcctataatacattggtagaattgtgtgcggagtatcaagtgcagccctgcaatgtttttgaacgcttgaaatatgggaaaacattggaggaagctatttatttgccgatcaggaataatgggaaaagatatgaaattgagtatgaagggaaagtatatcagaatgctgcttttttatgcagggaatataatatctccaagctgttagtatatggacaacagcgctataaaccagaatattcgtttatagaatgtttccgtttagtgaagcaattacgggatgaatgtgggtggcccaagactgaggtatttgcttttattccaagatgtaagattcaagggaaattctataaaaggatatcggattttgcatcggctgtcggcatgaccagagggcagatagatacctataaatcccgacaccatcataaaaatatgattgaagcattacaggaaatgaagaaagaccgtattccagcgtataagacggaatacggtcttttgccatatagtgaagccagaaagaaaaaatacacatctaagcagttggaacaattagaatatgtcccaagtgcattgccgcgataccctatgcttcagtcctttgattttacacaagacagtatggatatacttcttcgatatgaggaattatttcaaaagcaatcccaatgtaagagagagtggagggaacaaagataaaggagagtgggaaaagaagaggggagaagaattataggaaatgtttcttttccggtttagagaagcccggaaaagaatgtgttgatatcggtatggaagatttttgcaagggcaacaagttccgataccttgatgttcatacggttggtttccagcttggcataggtacttttggacatggagatacccatcaggtttaattttgcaatgacctggtcttgcgtaagtttattttgataacggatggcttggatatttttgccgatatccatgtctggtctgatcttctgcatgatagaatcctctcatttctcagtgtttcgcaataaagaaactttatattgattttactgatttcactttttataatgtttcgtaataaggaattatttgtgcaaaggggaatgattatgcatcagagcgatatagaacggtttgctttcctgtttttatgtggaaagcgtgacagggaaatcctgctgggaaaagaaaaaatgacattttcagatttggacaggctgacgtatgttaccgatttccttggtctgacaagattgaacctggatatttggcatcattatggagaacaattccgagaacattttcaaagactggaacagttatatgatgaaacctgcagtattgtttcttgtgatataaccgaaattgatttatatttgcaggatagatggttacaggaattttgtaacaatgtaccagacagaaagatccggaaggaactaaaagaattagtcaaaaagatctataaagaaaagggaatggaaatcccagaagagacaggcatcatttaggtgtctgtcttttcttttggaagggaggtgatagcaaaggtgagtatcagtatccatgaattattggcagtagccagggagtcggagggtgtgaaggcagtacagggagatgccatgctatgtgagaaacggtttgcaccggacacccggtatatggtggagtttttagtgttgaagcagacagagaagtttgaggaagcgggaatatatcatcgttattttttaacaaagaaagcatattacgaaatgatagagttacagagccagggaatccttcgctttcaaagacaggctcttgttttggaaggaacactgcattatcttcctgtccaaacattttttcgagaccaggagtaggaagaacaacaggctggaaagaaaagaatgcctgccggggcgcgcctttgggggcaagggctctttcaacggaaattttacatagaacagaaaagaagggagtggtaagtgatggtcattggaatcgaccatggatattatgccatcaaaacaaagcaggtgtgtttccccacagggatcatccggtatgaatacgaaccctataccatgcagaatgttctccagtaccagggagaatattatgtgtgtgggactgggagacagacattggtaaaggacaagaccgccaacgacaattattatcttttgacgctggcagcgctggcacaggagattcgaaagcgaaagggggaaaggacagcgaaagttgttcttgcagccggacttccccttaccgggtttggaagggaaaaacagaaattcaaggaatatctatttcaaaaacagctaatccgttttttatatgaaggggaacgctatgagatccagattgaggatgtgaaattgttcccccagggatattcagctctggctctttatccagagtatttaaaagatgagccttctgtgcttcttgtggatatcggaggctggacggtggacttgatgcggcttgataatgctgttcctaacgcagctacctgtagaagtctggaactgggtgtcatccgttgtatggatgagatcagagaacaggtaaggagaaatacaggactgtcggtaacggagacgcagatcgagcgtgtcttacgtggaaaacccagcagcatgcctgcggaagtggtgtctttgattgagaggcagggcaggctttatattgagaaaatcctgtctgcgatcaccgaggcaggctttgacctgcgggcagtcccttccgttttcatgggaggcggtgctgctatttttaaacaccgtgtaagcgagcaggaccgcctgtgtcgcccgatttacttgacggacgtccatgccaacgctgccggatatgaacggattgtggggcagatgaggacgctgtgagccgcccggtcttttccttccgcccaaaccttaagaacccggaacatgaaaaagcgtggcagcttttgatggagattccgacagggcagaggaaccagtatctggtggatgtgatcctggaacaagaagagagggaaactttaaaaagactcattcaggaggctgttcgggaagagttaaaatgtggcgatgtggaacggatgccagcacaggaaaaggaagaaattcccggtcagatgctggattttttatttcagatggagcaggagtaaagggggtgaggcctatgggcaaggaaagtatggcattgttggatatgcttgggttttgcatacatttgacatggattctttagtgggtattgtgaatagctttctttcaaattttggagtatgttgtgtataacaaaacgaaaggggaaaacgcttatggcagagatgaagaacatatgcggaaagatcccggtggaattacatgagaaggtacgagccgagatcgaagaaagggaaacaagtacacagatctttatccggcaggtgatcgaagaacactttaacagactggagaacaaaggagaagaaagcatggaaaaaagaacattagcagtacaggtcacagaggaattattccagagagtcaaatgggcagtcacaaaggaaggcatcaaacagaaagattttatcatccgcatcatcgaaaaagcggtggaagaggtagaagccaaatggaaggaactggaacagccggaagaaaacgcagaaacagatagactggaagaagcaaaagaaactgcggaagatgtctatgaagaagagactaccgaagcggaaaccgaaacagtggaagccgcagaggaagaggcggatgcagaaatttctgaggatgcagaggaagaagagattccggaatccggggaagaaaccgaagagatcgcataatgccaaacaaatagaactataaaaccagcaggcggtgtgggagaaaaaccatgccgcctgttttttttattcagcaaaggaggttgatagccgcaaccattcgattttttgatttattcagcgggatcgggggattccgggaagggttaagacgtgcaggcggttttacctgtgtgggacactgcgaggtggatgcttatgcggataagaactaccgattgctgttcgacacagaaggggagtggttttgcaatgacgcaagaacaatcgaaactgaacgaatgccggactttgatcttttgtgtgcaggatttccttgccaggcattctctatcgccggaaagcgggaaggatttgcagatgccagaggaactctgttcttcgagattgccagactggttgcagacaagcgacctgcgtatttcatccttgaaaatgttcccggactgctttcgcatgacaaaggcaggacgtttcacaccatcctcagtacgttatctgagctggggtacggtgtggaatggaaagtgcttaacagcaaggattttggagtcccccaatccagaaaacgggtgtatattgtcggatatcttgatcgacgatgtgccggaaaaatattacctttcccaacagcaaatggaacgcctcttatacaaatccgaacaggcagccaggggaaaagagtgtacagcccggaaggattaagctgtactttgacatcgctggcaggcggtatgggtggaaaaactggattgtatgagatgggtgttcccatcaaggagaataccaagcagggatataagatggcgtatccgggagacagcattgacttaggatatgcaggcatgaataccagaagagggcgtgtggggcatcagatcgcccatacccttaccacaggaatccagcagggaacacttcattttgtagatttgtctccgccgcctttggtaacagagcattgcagatgtctgaacaccagacagtccggcatccataatcacaaaggggaatgttccggtgtcttaaaagaggaaggcgccagggcagtgctgactccgggaagggaagaaacccggcagaatggccggaggatgaaggagccggaagagccgatgttcaccattactgccacggaccggcatggagttgcctatcggggtagaatccggaggctggtgccaagggagtgtctgcggctgcaaggcttttatgactggcagattgaccgcatagaacaggagacttcggacagccagctttataaacaggccggaaatggagtgaccgtcaacgtgatcgaagccatcggaacgcttcttcggcaggcagatgcagaaatccgggcagaggatgaaaagacaaagaggtaaggcagtatggcaattggaattcaggatcagtattttggtacagagattgagatgacagggatcaccaggcagagggctgcggagaaagtggcagagctgtttggaacaagggcggtttgcaatggcggatattatggggtctggtctgtgacagatcaggaaggaaagaaatggaagttcatgtatgatgggagcatctatacggaacgcagggagcgtggacgcatggttcctgccggaagagaatacagcaccgagatggtcagtccgaaactttcctatggagaaatgggaaaattgcaggaagtggtgcggtgtctcaggcatcatggggcgaaggtaaatgcatcctgcgggcagcatgtgcatgtggatgcttccaatcacaccccaagaagccttaaaaatgccatgaccattatgtattccaaagaggacatcctgtttaaggcattgaaggtgcagacatcaagggaacaggagtattgccagaaggtacgccccattgtgctggagaagatccgccggatgccaaacagcaccatttccatggaaaagttgaaacgggtatggtatgggggcagggatggaagccatgatcattatgacgatacccggtactatgcgttgaaccttcatgcagtgttttccaaaggaactttggagtggagatgttttgagagtaccctccatgcaggaaaagtgcgggcaaatatcactttggctcttgccatctctgcccaggccatcaatcagaaatgcacccagatgcggaaaacggagatcacagagaatccggcatttaccttccgtacctttttattgcggctggggctcattggaccggaatataagaatgtccgggaacatctgcttgccaatctggagggtgacagggcatggagatatgaccgcagtacctatgaatgtttgaatcgaaatcatcgggcggaggatgcccgttaggaggtaagagatgaaagaatcctattattttgcctatggcagcaacatgaacttagaccagatggcgtaccgctgtccggcagcttccgtagtggagaaggtcaagctggagggataccgcctgaccttctgtggcagggggaaaggatgcggtgttgccactattttgccggaagagggcagccgggtggaaggggtgctttggaagatcacaccggagtgtgaaaaaagcctggacttttatgaagggtatccccacctgtatgggaaggagactgttcttgttcagggaaaggatggtgtgaaacgggaagtcatggcatataccatgaatgcaccctataaggatcagcctgccatcccctcggatctttattttatgggaatcgtggaaggctgccatcagaatgggatttccagccgatctgtgaccgatgcgctaaagcgtacaagacaggaagtgggaaagaaaaaagccagtcacaagaaaacagaagtcagtagataacaacgccgcaggggaaatcctctgcggtatttttaacgaaaaaaggagaatgcaatgaagagcaggaatatcaaaacaagacttgcagcctttgggctcgcactgctcatgggtcttagtccgcttgggaacttagcggatgtccatgcggcagaaacaaaaaatccgtcagagccagtgacggagagcgtagaaatatctgaaacggaacagacagaggaagcttcagaagctgcgaaacatttggtaacagcagaagatatcacgaaagatatttccgacaaggattttatggcagagacttgtatggaaggtatccattacaattcagaacaagaggatgttaccttggaacgtatcgaagcggaagatggagggagctaccaccctgaccaggcaggaacctatattgcaacctactgggttgtgccaaaggatgcgcgtgacagctattctgtgagcagaaagatcatcctgacggatacggaagggcaggctcatacagaagaaaatggcggtcagaaacagaaggaggatacgaattctgaagaagattcggagacgcctgtgcaggagatcccggatgtggaagtgacggtatccggggaagatgcggatgcacaggcagcaagggaactggaagaaaagattgaggatggggaagtgatgatgctttccggtgcggaaaacacgttccgagcaaaggaaaccgtacatctggaaaaaggggagaccatttactatccaagttatattggaaattacttaacctgctggtttacggtcaatggaaagatcgcttactgtctggaatcccatcgttcctcaccgccgagtggagactatgtggcacaggtactggacagcaataagaacttgcagaaggtgctgtattatggttatggcggcgccggggatattacaggcagttatctgtccgggaaaagtgcagaagagaaatatgtatatacccacatcgcagccagctatgcctatgcaggtgaggcaggatttacaggatgtaagtatgaagatctggtaaacgcaggcgtgatcgcctatattgaccacctgtttgctatggaagagccgccgaagggggaaatctccctttccaagacttctgtaaaagcagtccgaaatggaaatgtacagaaaacaccggatatcacattgtccggggatcaccgaaactacatttcagtcaatgtaccaaaagacatcaccatttataacaagacaaagggaacttccgcagagaatggtgcgctgaagatctatggcggggataccttttatttgactgccccaatgcttcataccggaaactattcctccggggaactgcatggttctgtaggggaaacctggagaacgctggtattatccacaggaaacagcaatcaggacattggagtctttgaatcggagaaagccaatccggtaagttttacggtagactggctggagatgacaaggatcgagcttttcaaacaggatgcggataccaagaatcctttagacggtgcagtgtatggcatttatacagacagcaagtgtgagcatcttttgatggaaatgccagtcaccggggaagagggaaaagcagtcagtgattattttgaggcagccatcaaaacagtatatgtgaaggagatcaaggctccagacaagtatgcacagagtgatgtgattcataaggtggatgtggaagccggaaagacggtcaccatctcagcaaccgatgagagggtgaaaggtgctgtccatatccaaaagatcgataaggagacacaggcttttcttccccagggggatagttcccttgccggggctgtgtatggtctgtatgccagagaggatatcgtccacccggatggaaagaagggggttctgttcaaaaaagacagcctcatcgcacagggcgtgatcaaggaggatggtaccttagatttttccgaattgtatctggggaaaatgtatgtgaaagagatcactccgccggaaggctatacggtagatccaacagagtatgaggtggaccttgcttacgaaggacaggaagtggcagaggtaaccagggacctgacggtacaggaacaggtgaaaaagcaggcgttccagctgatcaagatcagcgaagatggagaccagacagaaacagaccttgtggaaggggcaggttttcaggtgtatctggtcagcagcctttccaaagtagagagtggggaattacagccatccaatggggatcagtttactgcggaagatttccgaggttatgatttcagtaaggaagaggtggcagtgacctatgtggatggcaaggctgtcccggtaccagagcttattacagataaaaaaggatatgtcctcagtccggagcttccgtatggtctttatgtggtagaggaaagcaccgtaccggagaatttaaaagccatcgatccgtttttggtaaaggtagatgaggatagcagagaaccgatggtatggaggatcttcgatgaccgtccatttgagtttttgttaaagatcgtgaaaaaggatgcacagacaggaaatccagtcttgaaggcaggcgcatcctataaaatctttgatatggaaaaagaggaatatgtagagcagacggtattctatccgaagaaagagacgattagtgttttcaagaccaatgaggaaggctatctggtaacaccggaagaactgaaatgttctacttaccggatcgaagaagtgaaagcaccggaagggtttgtaagacagggatatgagagttccttgtatgaagcggaaacaataatttctccattggaggtgaccggaaaaggcagttacaaagagaacccgaaagagggaatcgtgatcactgtttcttccgataccgcccatcagatcgatccagataccggggcagtcatcgtggaagtcgagcagccaaacgatgagcaggtgggaagcctgacactgaccaaaaccggggaacagccagtggaagtgaagggggattccctgcttgcaaaggcaaagagactggcaggaaagctcaaagatgcagtgaccggagaggataccgataccggagtgttccatgattttgtctatgaagaatccggtgtggaaggggcaacttttgaattgtacgcaaaggatacgatttattccccggacggagcaaaggatgagcagggcaatccggtcatccgttatgaaaaggatgatctggtagcaacactggtcacagataaagaaggaaaagcagtggtaaataatcttccattgggttcttattatctgaaagaaacggtggcaggtgaccatttcgtattaaacccggaacagaaagaatttaccctgactgcagaggatgatacgcaggctgtcgtttatgaaggggttgcttataaaaatgaaagacagaagatttccatttctgtagagaaaaaagatgcagtcacagaagaaaaactggaaggcgttatttttggattgtatgccaaagaagatatcctctcccagcagggtgaggttcttgtaaaaaaagatacgctgctggagaagaaagcaacggatgagaagggacagcttacctttgacagtgacctctatcatggaaaatattatgtgaaagaagaagtgagaaagccggggtatcttccaaatgaggaaatctgggagatcgatgcctcttacacagaccagaaccttgcagaaatcaagctgacaaaagaagtggaaaatcagccaaccgagagtcagtttacaaaaaccgacgccacaaccggggaagaattggagggagcgaagcttcagatcatcgaccaagatggcaacatcgtggaagagtggatcagcacaaaagaaccgcacgtagtttatggactgccggagggaacgtatacgctccatgaagagctgccgccttatgcagaagggtatgtgtctggggaagatattgagtttgaagtaaaggaagatggcagtgtgaccaaggtggaaatgaaggatacctattccaaagtggaaatctccaaaacagacctgactaccggagaagaactggaaggagccaagcttcagattttaaataaagatggtgaggttctggaagagtgggtaacagatgggaaaccgcacctggtagagaaacttccggtaggggaagaactgatcctgcgtgagatcacagcgccggaaggctatgagatcgcagaagatgtgaagtttacactggaagataccatggaagtccagaaggtggaaatgaaggatgcaaggacaccggaaactccgggtgtgccgcagacaggagatgaccactggaaaccaatccttctgtttgcacttttaggcgtgtcagcagccggactcatggcaaccatgctttataagaagagacataaaaaagcagatgaagcgaaaaaagaagaataagctgtggatgctgcaggcagtcttgtgtgctgtctgtatcctcagtgcggcactcatttatcaggattatgtggtcattccccggcagaatcgggaactggtggaggagttaaaaacctgcttcccggaggacatccctccgggcgggggctctccaggagagaaagaggaacaggctggaagagaactggaagtgcctgccgttgaccttcgatccctccagcgccagtatccggatgttcggggctggcttacgatcccggaggttgggatcgattatccggtcatgcagagcagccgggaagatccggagtattatctgcggagggattaccggggaaactacgacatcaatggaagtttgttcctccaggcagactgtattttgggagaatcaaagaatctgacgatctacggtcacaacatgaacagcagggcgatgttcgggaatctggaccggtacgcttcctatgattactggaaagcacatcccaaggtgttctttcagacgccggaaggcatggaagagtactggatagcggcagtattgaaagctgatgtgtccatgtttgacttccagcaggcatcttttcacagtccgcaggaattggaggcttatgcagcacaggcgaaagcgctgtcgctgtttgaaacaggggtagctggtgcaggatgtgagacaaccctgacgctggtaacctgttcttatgagtggaaggaggcccggaacatccttgtggcagtaaaaacaggagcttaaaggggaaaaagtgttcaacagtgggaactttcttccggtctctggatatctccagtacgcttcggagtcagtaatgtcagaaagtgttcaaaagtaccccaaaagtgcagaatatgagacaagctgcaggtaagaagtggcactacggaacaaaaagtgttcgaagttaatggatgtgcaacggatcgtggcggcttgtgtagtcttgtagtgttgggaaagtgttcgaagatgggcgcttttccagctctttggtggctttttggaactgaagttgccgggaagtgtttgaaagcacccgaaaagtgcagaatatgagacagggctgcatgaaaaggacagtaccatcatacacaaaagtgttcgaggatgtaggatgtacaacgaaatgtggcgtgatgtagtgtcagaaagtgtttaaagactgggacttttgcagctatctggatgtatctgccatctatctggaatgtgttttttaagcgaaaatctgagagtataatgaaaatgtaaaatcggatataaaacttagaaaatgtgagaaatagtgcttgaattgtaacgacaaaagcgttacaatataagaaacaaggaggtgtgatcatggaaaaaacagcaacattaaacttaagagtaaacccaactgtcaaagagcgggcagaaaaagtattgtctcagttaggtgttcctatgtcaacagcgattgatatgtatttgaatcaaatttctcttacaggtggaattccattttctgtttctttaccaaaagcaccagtatcgattcatgcagatgccatgacaacagaagaaatccatcagaaattggaaaaaggttacaatgatatagctgcaggaagagtgcaaaatgcagcagaagcgttcgcaaaattcagggagaatcattgatatgaaacactatacggttgagattacaaatgaagcattggctgatatggagcagttatataatcacatcgcttatgttcttcaggcaccagaaaatgcgatggatcaatacaaccggattgcagacgctattttaacattggatactatggctgagagaatccgtattatggaatcagagccggaacgaagcaaagagatgagaagattgttggtagacaattattcggtcttttttgtaatccagggagataaggtgattgtaacagatgtactgtatagtgcatcagatattgaaagccgattaaaaggttaaatgagaaaattaaacaatatataaaacatcaggcaggatatgttcccgtaaaaaggaaggtgtcctgcctttttgcatgaaagagagggaattcatatgagaaaattttatacagcagaagcagtaacagaaggacacccggacaaattgtgtgaccagattgcagatgcaatcttggatgtgtgtctgaaacaggatgaacagtccagagtagcatgtgaggtgcttgctacgaaaggaacgatcattgtggcaggggaaatcaccagcacctatgaaccggatgtgtttgcagttgtgcgaaaagtactgtctgacgtgggttattccagtgaagggattgcaatggacacttttgtccatcgacagagtcccgatattgcaggggcagtcgatacttcaaaagaacgaagggaaggagtgtctgacaatcagatagactggttccaaggggcaggggatcagggtgtgatgatcggatatgcctgtgatgaaacgaagcagctcatgcctatgcctgtggtgctggccaatcggattgtccgggaattatctgcctgcagacaaagctcttatattcaggggatcttaccggatgggaaagcccaggtgaccgtagaatatgaaaatgggaagcctgtccgactggatagtgtggtagtgtcctgccagcatacggaagaaaaagatttgaaaaagctggaagcggagatccgaaagaaggtgttattgccggcgcttcgtcccctgccaccggatgaggaaaccaagatttatatcaatccatcggggcgttttgtctgtggaggactggatgcagatacggggctgactggaaggaagctgatggtagacagttatggaagcatggttccccatggcggtggtgcattttccggaaaggattgttcaaaagtggatcgttcagcagcctatatggctagatatatcgccaagaatatcgtagctgcggggcttgccagcaagtgtcaagtgtctttggcttatgcaatcggagtggcacagccagttatggtgcaggtggacacgtttggtacgggaaacgtgtgtgcggatgactgtctggagctggcaatcccgctggtgtttgggctgactccgaagcagatcgtggataccctgcgccttacccgtcctattttccgacagactgcagccttcgggcatttcggaagaaaagagtttccgtgggagcgcaccgataaggtcgaggctcttcgcaatgcagtgatctgatggcttgggttactgaagaagaatatcaggcagccaagcaggtgagagcctacgagtatctgcagacataccagccggggagattgaaaaaaacacggacaagaaatgaatggcagcttcaggaccatgacagtttcaaaatcaatgagattaccagcaaatggcattggaagtccaggggtattggtggaatgtcggctctccggtttttgatgcaggtagatggcatgggatatacggaagcagtaaaaatcttgtgtgagcagacgcctgtgtatgtttccagagcagaaccagcccccaggaagaagcccttttccctgcctttccccaacgacagtttttaccgggtacggagatatttgaaccaaaggggaatccgggatgaggtactggattattgtgtgcagctgggaatcctgtatgagagcgccccctaccataacgctgtttttgttggcatggatgaacagggagaagcaaagtatgcgtttctgcgtgggatttatgacagccggggaaagagctttcgaatggaacaggaaggaagcaacaaacagtatagcttttgtgttccgcctttggggaaaagccatcgggtagcggtgtatgaagcctgtattgatgcccttgcccatatgacgctggaagatggacgaaccgataagtatcgcctgtctctgggtggaatcgcagcgccgaaagaaggcgcggaacgagcaacaaaaaagatgaagcgcccggatgcattggaatattttctgaaagagcatccggaggtgacagaaattgagctctgcaccgataacgattttgccgggcgatgggcatgtgcgcagttaaaagagcagtatgaggaaaaatataccgtagtttgtaacttaccacagatggaaggtgcagactatggagacctggcaaaacaggcggtggaaaaacagaagaaacagcaaaaggaaagaggcaggtgaggcaaatggaagatacgatcaaaatagaattattgacaccgctgacaggaacctttcttcccaatgagatggaacaagattgggaagaagaggattacaatgactttgaagaagagcaggtattttttgaaggagatgatttaacggagtatgcttctgtgattcaggaaaagattgcagaatacaaccgtgtcggacatgacgatgataggaccgataatctgatggattattttgacggaagtgctgccattaaagaaaaagtagtgtccgcagttccatcggtgaaagaatcggatggtgtgttatatggctgtacaactttagaattgaaagagtatctggaggcggaagaattatcggaactgtgtgaatatctcaccggacaatatagtgatggatggggagaaggctttgaacagcaggagattccggtagagggtggtgaactgtgtatacacttttggcgccccatagattttgaatttcaacaggcaaaatcagaagtctcaaaagaaaagtcggagaaacaagaaaatccggtaaatgttccgaaacgcctgaaaatgcagcttttgggaatggatggaaatgtgtttgcggttatggccagggcaagtaaactgcttcaggaaaatgggcagggacaagaggcaaaagaaatgattgcacgtgtccagaaatcagagaactattatcaggcacttcatatcatcagtgaatatgtggaaacagaactgagtgcatcttctcagaatgataccaagcccccaaagaaacgtgggaaggaagaatgccgatgaagttatcttttgtcacatcaaaggagatgtgggaagaaaaaatagcagaaacagattgaaaagagaataaacagccagaacactgacaagggaggtcttatggaaaacagattgcaattatggagtcctgtgtggggatggcttgccacaaaagaaggggaatctgtagatttgaagggacaggatcttgttctttatgaaactgccatccaagaggcactggagcaggaaaaattgtattacagaaaaaagtcggcaccattcaatctgatggattactatgatgcggatgattctgtaaaggagaaagtgcagaacctcgatatccaggtgaaaaaagaacaagatggtttgtatgtttgtgccagccttgcattaatagagcctcttacacagcaggaactggaagcgatccagaactttctcagcaggcagtacgaagggggaatttttgatacctcacgtattcgtacctattccgtagaggaaggagaagtcgtttttgatttttcagtagatacaaaagaaaagttctctcaaaaagaagtccaatgcgaaacgcagaagaaatatgaaatcacttccatagcccatccacaatttccatggctgcatagaatccgagcattggtagacgtaaatgaagcggttcccaaaggaaccttgggtggctttgtagaatatgagcaaaatctttcccaggaaggatcatgctggatttatgaccaggctatctgctgtgaacgtgcggtagtggaaaggagtgcaggactgttccaagaagcgattgccaagggtgatgcccttcttacgggaactgcagtgatgtatcaaacgagtattgcagaggaatcctgccgtattctagctggagaggtttggaatatggcacacattcgaggatttgccaagattactgcggcaaaggaaacaggagatgcacctttgattctcggaaatagcttggtttttggaaatgtatgcgggaaagtattggtgagaggaaatgttctgccaagccggagtgtggagaatcagacacaggagctgttagttttcaggggaggtgattcaattcataaagtgaatgaaagcaagaaaaaaacaaacagtaaaaaacagccggagcgctgataagaaaggatgatgcctatggaaaataccctgcagttagggaacttattgaaagaaggaacatacccggaggaatataccggagggaaaaactggacaattttacatggagatacgctgaaactggtgaaagcatttcagccggggatctttgatgcagtgattaccgatccgccttatgcgtctgggggaacaaaacagaatgagcgaaaccgcacgactaatcagaaatacagcagtatgaaggcagagaatgcactgccggattttgatggggataacaaggatcagcgttcctggacccattggatggcagagtggctctacgatgcgcggaaagcctgtaaagttggtgcgccaatctgcctgtttattgactggagacaatatccctctattaccgatgcactccagtgggcaggctggatctggagaggaactgcggtttgggataagggaaactctcgtccgcagaaaggacgttttcgccagcaggctgagtatattgtgtggggcagtaatggcccgatgccaatcaaccgcccggtttcctgtcttcccggtgtgttccgttatggaaatccccagaaccgtattcatgtgacagagaaaccgttgcagctgatgaaagatgtcattcagatttgtgagccgggtggtagaatcttagatccctttgccggagcaggaacaaccatccttgcggcggtggaagaaggctatgagacagtaggcattgaagtgaccgatgcttattataagctgggcagtgaccgtgtaaagtttgcattggaagcaaaggaaaaagaagagagcgagaaatagcaagggcatccacatggatgtccaactttgtttcagaagaagaaaagtgcatccacctggatgcaggaaaggggtgaggcgatggaacaggcgatggcctatgtgtgttgtccggcagaagaaagcagagtgaaggtgcagcgatattgccggaagatttatgagttgggatatgttcccatttgtccgaggtttggatttcttccttttctggatgaaggggaagctgaggatttgcaggcatacaaccggatgtcccacttgatcttaaagcggtgtcggatggtggtggtctgtggaaaagaagtcaccggaacgatgaacacagatattagtaccgcagaccgattgcatatcatttgtaccacattagatggattgatcaagatcaaagaaaaggaagcataatcgattctgcatgggggagtcgatggaaatcggtggaactggttttgcaagcatagcgtttggatatccaaacgcactttggggagaaccccaatcccccggcagtcgagaaaggagagaagaaacatgttttttgcaggaatggcgcttggggcaatggcaggcgcagcctttggtattggactgatgtgctgtgtggttgccggaaagcgggaagatcagcagatggaacagatgcggatacgcagacagaaacagggagaacggaaaacaatccatttccgagatatggaagggttggagcggttctcccttttggatggggaaagcctttgcatgatggcagaggacggaacaaaagagattggactttgccgctttgtggacgaaaagctggtggatgtgaatgggcaggtctgggagatcggggaattcctctggcagatggagcgcagaggaatccaggtgtatcccttacagatagcataaaagaaaaagggaggtggtcaaatgagaaaacgaaaccatgtggttccggtacggttgaatgcaaaggaacttcggcatctggacggacaggtggcaaagagtggactaagcagggaggaatttttacgttccctgatcttaggcgcacagctccagacaaagccctgtgagcatcatgcagaacttcttcggaagattgcggggctttgcaacaatgccaaccagctggcccatgtcgccaatggcaccgggatggcaggggaagccagcgtacaggaaatgctgcggatttccaaagagacctggcgtctggtaaaagaggaatggtagatggcatataccagcgtcctccccgtccaccgcctggaccgttccattgattatgtgaaggaccgggcaaagaccactaagagtgccggctctttggaagaagccatcgattatgccctaaaccgggaaaaaacagaagagaccatttttgaggatgccattgggtgtacctgtgaaaatgcctatgcggacatggtaaagaccaaagagcgcttccataagaaaggcggggtacagggctaccatctggtgcagagctttgcagaaggggaagtatcccccgaactagcacatctcattggacaggagctggcagagcagttattgaaagggcagtttgaagtggtgatcacgactcatttgaataccagtcattaccataatcatctggtatggaattcggtgagcatggcagatgggaagaaataccacagtaatgccaaaagttattttaccgaagtgcgtcagatttccgatcaattatgcagaaaatatggtctttcggtgatccagacgaatcagggaaaagccatgcattatgcccagtggaaagcagaagcagaaggaaagcccacttggaggactgccatccgcatggatatccgggatgccattggtgtgagtttttcctggagtcagtttgtcaaagaaatggagaaacggggctatacctggaagctgaaccggaagtacccatccttaaaaacaccggggatggagcggtatattcgtctgcgttccttgggaaaaggatatggggaggcagaaatccgggagaagatcctgcgtccaaagatccaacaggtgtatggaaacacgcagatgcagtttccaagacggaaacttaccggacttcagagactttactattcctatttatatcagatgggggtatttccgaagaaaccaaagcggattccctatgcagtgcgttccgatattcggaggctggagaaacgaatcagccagatggaatttttacaaaaggaagagatcaccaccagggaagagctggcagcataccggaaacccttggaagaacaggtactttctttgatgaaagagcgcagagaattataccggaaagaaccgggcggtatgcgcattcaggaaatcaatggggagttaaaagaacttcgtaagaaaatccgtttaagccagcagattgaaaagcagtccttggaaatggaagagcggttaaggcaggcaaaagaacaggaggaggtacaggaaatgtcagggaaacagcgaagggaggcagaatggaatcggtaaggaggtgagagcgtatgaactatggcggtgatgcggcggatcagattgtccggtattccatggaaggcatggaacataccttacggattagtggaagcattgcaaaaaatctggcggtgctgattgtagcggtgatgaaggatcagaaaaagaccaggggaaagaccaacctgcttcggatgttaaaggaacagcgggcaatgaagtttttcaccattccccatgacaggctgcgggagtttgccggggaagccaaatccagagggctgttgtatgtggtcatccgggataagaaaaatcccaagtccgcagaaatcatggtgtttgccgatgatgcagcaaaggtaaaccgggtgctggacaagatgaatctggactttgtaaaatccgaagctggagaagcggttgtagaacaagcgccagtacgggaagcagaccgtgtgattgatgcagagtttaccaagaaaacagaagggaaagaggaacttccggtgaagaccgaaaaggtggtgctgccggaagggaccattgaatttgaactggatgaagaagagcatttgtttgatgtaggggaagtttctccttcgggggaaaattttacccaggcggagaaggcagagaatctgtccgaaccttcctcgcacaacagcgcttctttttccgggcaggaaactagctggaaaggggacaagccatctgtccggcaggaactaaagaagattgaagccgagcagaaacagcgcaggcagacacagaagagtcggagaaaaccgagaaaccagcagagaaaaaagaaaaaagtgaaaggcaggtaaggtgatatggatttaacgaatatgatcccaggtggagcaggggaagaacaggcggtagagcagcggctgtcaaaagaagaatatgcagccatgaaaaaacagcagagggaagaagtgtgggcagaggttgacgcccaggcgcaggcagtgttccaaaatggagaatctttaaaaggattcttggattttatggcacagtgcaacactcagaaaacgcccaaccttctgctgatctacggacagaatccacaggcaaccgtggtaaagtcttatgattactggaaggcagagaaccgttccccaaaatccggggtgcatggatacacctatatggtcagtacggaatatgaaaaagacggggagatgcgcacaggctataccatcagtaagggctttgacatcagccagatgagtggaaagcctctggaagaacgtccgcagcgttctatggaagaactgatacagtctgtactaaaggatcaaccagtgcggatgcagatcgcagacaatctgccggagggcatccaggcacagtatatcccgaaacagcgtaccgtctatgtgcgcaatggcatggatgagaatacaacgttccatgcagtgaaccgggaactggcgtgtgcagcattagaccagcatgatgggaattatgtcaggaagaaagttaatgcccaggcatactgtgccgcctatgtaatcggtaagcggtatggggcagaggtgtccggtttccagtttggaaaagtagcagagatgcaggcaaacgggcagaaagatccccaggaactgcgtggctttttaaatgatgtgcgtcaggcagcctataccatccgcaaccatatggaacggaacttcggggaacaggagcagactttttctaaagatgatttttcctttgaggaaccgccaaagcagacaccgaagaaggagaaaaaagagaaacagccggagcggtaagttctgaaagaagttccgtctttgggatagctattgtgggggtcttgtggtatgttgggtgtaacaaaggaggtgccgaagatggcagattactatttgaaaacagacaacatcatgaaaaacatgtttacggtggcactcaaagatgagttagcagcccagagtcagatgggaaaggttcgccctgcgacagaagccatgctgcagaaaatccgttcctatgaactttccgagaaaaggcttcctattaccacaggggaacagcgggaacttcgcaatgccctcaatcggctgcgggacaagtatttggccatgggcagatacagcgatggcattgacagcgtgatcttaaaggtcatgaaaccaaacaccagcaggcgcttcttctggtagcagaagggagggatgtctatgaggatgtataatcaaaaacaagtggaacaattacgaaagcggtatccgaaaggaacaaggctctgcctggactttatggatgaggcagggatgccgccgggattgcagggaacggtagcatttatcgatgatgccggacagattcacatgcattgggagaatgggcggagtcttgccattgttcccggtgtggattcttttcatagggtagacggatcagcaaacgaagtgccaaaagacgaaaaagcgaagaaggggcgaagcctgcaaaggtagcatgcaaacgttctgacctttgggtatggctgttgttcctgcctgttgtctggtgggcaggcgcgatcactgcctgtgccatcgagccggataccaatctgttacaaatcttacaagtgctgaccgaaaaactggatcagccattttctattacttatacaccgtacacgctgcggtgtgtgttcacattcacaatcgcctatgtgttaggcatcggtatttattactcccagaagaaaaattatcgaagaggggtggagcatggctctgccaagtggggcgatgcagcttccatctgcaagcgttaccgggacaagcggtacacccagaatctcattttaacccagaacttccgcatgggactggactgctataagcacaaacgaaacttaaatgttttggtggtgggcggttccggtgcgggaaaaagccgggcatacgctgtagtcaacatcatgcagtgcaactgttccatggtgatcaccgatcccaaaggagaacttctgcggaaaaccggagggctgctggagagggaagggtatgaagtgcgggtgtttgatctgattaacccggaaacgtccttttgttataatccctttgcttatgtgcgggatgacaaggatgtgctaaaactcatcaataacctgatccgaaataccaccccgaagggggcgcagagttcggatccgttttgggagaaaagcgaaaccgcgctgctgcaggcattgatgctgtatctgttacatggagcgccgccggaggaacagaacttctccatgattatggaaatgctaggctctgcccaggtaaaagaggacgatgaggaataccagtcacccttggatattttgtttgaacgactggagatgcgcaatccagaaagtattgcagtcaagcaatatgccatttacaaacaggcggctggaaaaactgctaagtccatcctgatttccgtaggtgtccgtctggcagcgttcaacttaaaacagatcgccaatttaacctgtaccgatgaactggatctttacagcatcggggagaaaaaggtggcgctgttttgctgtatcccggatgcagataccagcctcaattatctggtgggcatgatctacagcaacctgtttcagaccctttattatgtggcagaccggaaataccatgggaaactgccgatcccggtacactgcatcatggatgagtggcccaacgtggcattgccggatgattttgacaaacttctggcaaccatgcggtcgcgcgcaatttcctgcagtatcatcattcagaatattgcccagatgaaagccttgtttaaggacagctgggaaagtctcatcgggaattgcgtgcgcccagaagtcgccagcgcattataaattcggcggcgtggtatttatggaatactgcctttagcaagcagtaggtaaaagtatcaagtgatgaaaaatcacagcctattattctacaacttatccgagaggggaaacccgaaggggagtgtagcatgttgtcgcttttgtcaacagacgagagcctgaatgataagatactaatcctgtgtatctgaaaattcaagaataaaaattcgtgtatgaggtacaaagctaaactgcctgaacgatagccagagtgggggaatccgcactccgcatacgaaaaggattgaaacgtatgctattccatgttggtttcatttcgcagttatgaaagcaagcgatactcatggaaggacaaccgcaagacagcgggtaaatggcgaaagtcggtgccgacaacacgaaacgctaatttcataaatactaactggggatgacctaaactcggtaacgggcatggtcacacagctcccatagtagtctgagacgttaatgacgctcacatggcgaaggggagcagcttatttactaatacgatatgaaaggacggtgcgagaggcattgagaaatccaatccaagtattaagtagtttgacggaaaagtcaaagaatgaatcttacaggtttcagagattatatcggaatctgtacaatccagagttctactggcttgcatataaaaacatatatgcaaacacaggcagtatgactgccggtgcagatggaactaccattgatggcatgagtgacgaaagaatccaaaggattattgaatctatgcgagataaaagttacctgccaaaacctgcacgcagggaatatattgctaagaaaaacagtaataaaaagcgtccgttgggaatccagtcgggcaatgacaaactggtgcaggaagtagtgaaaatgattttagaaagcatttatgagcctgtgttcaagaaaacatctcatgggttcagaccaaacaaaagctgtcagaccgcattataccagattcagaaaacctttactggaacgaactggtttgttgagggcgacatacacgcctgctttgacagttttaatcaccacacaatcatcagattgctgagaaaacgtattgatgatgaaatgttcctacaacttatctggaagtttctaaaagcaggttatatggagcaatggacgtacaatcggacttacagcggtgtgccgcagggttcaggtgttagtccagtgcttgcaaacgtgtatcttcacgaattggataaatttatggaggaatatgcacagaaatataaccagggaaagaagaaacaaatgaactccgactacaataaagttgtcaaaaaggcatcttattatagatgtatgggcaaaaagaagtgggcggatttatctccagaagaacgtagggaacgtaataaacatttgaaaatgcttgaaaagcaagcacgacaactaactcctaccgaacctttggatgagacgtataaacggattcagtacacccgttacgctgatgacttcattattggagtaattgggagcaaagcggacgcagaacagattaaagctgacatcggcagatttctcagggaagaactggatttggaaatgtccgaaaccaaaaccaaggttacgcatacaggagacagagccagatttttaggctacgacattacggtatccagaagtcaggatttaaagaaatccgcaggaggatacaaaatcagaagcaatgcaggtgtggtgaaactgcttgtacccagagaaaaatgggtagggaagttactggaatatcatgcaatcaaaatcaagattaacgaaaacggaaaagaaagatttgtagccctgcacaggggaaaactggtaaatcaaagcgatatagaaattctggcaagatataatgcggaagttcgcgggctgtacaactattatgccatagcgaatgattcctttaagataggcagatttgccaatcttatgaagtacagtatgtacaagacatttgcatgtaagtataaaacaaatgttcacgaaatcaagcgcagatattgtgtcggaggtctgtttacaatcgcatacgataccagagcaggaaggaaaaccacgaccttttacagagacgggtttaagcgaaaagaatcagctacgaagtttgacaatgtgagcgaacttccgcagttctcaaaatacgctaaaaccaacactctgaaacagagagtagaacgccatacctgtgaactttgtggaaaggattgcagaaatctggaaatccatcaagtaaagaaactaaaagacttaaagggcaatgcggagtgggtactccttatgcgcaaaaggagacggaaaactcttgtggtatgccccgaatgtcataaacggattcattcttaataccgcaaatatgataagcggaaagccgtatacatcgagaggtgtacgtgcggtttgggagggaggggatgcaagtcctgcaaaggatgagctgaaccttacctcatgatgaatttttatacctgggcgggaatgaaaaagaggggcataaatatgtctcagaactactgggaaaagaaacgttggataccaatacctacgggcagaccaaggggagaagcggaagttattctgtgaatttccaacagtctggaagagaacttcttaccccggatgaagtgcgacttttggataaccggaaagcggtgctgctggtgcgtggggagcatcccattttggatgagaaatacgatttgcataagcatgtgaatgtgaaatataccgaggatggcggtgcgcctccatatgattatgcgaaagcaccgctgtcccatgaagatgtaaccattgataccaggagactggatgattatgaactgctctcagctgaggagatcctcggaggggagcagtctttttgattggaggaatgccattgaagaaaacaaatgaaatgccaaagaatcaaacaggaagccatgccattgtaccgaaacggatgggaaaagggccaaaatatccctttgccttttatgtggcgctggtgctgtctatgaccgtaggggcaatgccggtgcttgctgccggagatccgctggcggttattaataacctgtccacctttatcttttccctgatccgggccatcggtctgatcttattgggatttggtgtggtacaggtaggcttgagcctaaagagccacgatcccagccagagagccaacgggtttctgacgctggcaggcggcgtcatcatcactttcgcaaaagaaatcctggacctgatcgttgggtagcaggaagaaatggaaaggggcggggagagattcttcctgccccggcaaaggaggtgaagctgtttgagtgataactggatcgtgcagaacctaaactctgcactgaacacctggaatgagaagctggcagaaatctggacactgcttacccaaagcccggaatcttttaaggggggagatatttggagtgtcatcactggaatcaacggagcgctgaccgccattggttatgggctgttagtcttgttttttgctgccgggattgtcaagacctgtggcagctttacggatatgaagaagccggagcatgccctcaaagcctttatccggtttgctctggcacaaggcgccattatgtatggcatggaactgatgacagcgctgttttccattgtgcaggggattgtgtccaccatcatggcacagtcgggcatgacaaacgggggtgtgacagaacttccggcagagatcgtggaaaagattgaagcggtgggaatgctggaatccattcccttgtggattgtgaccttgctgggaagtcttttgattacggtactgtccttcattatgatccttaccgtatatggaaggatgttcaagctgtatatgtacactgccattgcacccatccccatttccacctttgcgggagaaccctcccagtcggtgggaaagaactttatcaagtcctatgcgggagtgtgtctggaaggggcgatcattgcactggcctgcattatcttttccgtatatgctgccagtccgccggcagtaggggacacctctttaagtgcggtgaccattgtgtggaattatatcggagagttggtgtttaacttattggtactggttggggcggtaaaagcatccgaccggattgtgaaagaaatgatgggattataggaggaagtaaaaccatgaatgagaagaaaaatagaaacgatagaaagactttgccattcccttgggaatacgggcaggaagaaattactttgaaggtatccagctatgcttacggaaacggacttgcgattttgatgtattgccaggaagaaggggagttggaattgtttgatgatctgacggtaaatcttccgggcgggtatgggctggaaccccaagaggcatttataagcggtgattttacgaaggacaagctggcattcatcgaaaagaacaggctgggaaacagactgccgggacaggcccggtcaggctttgctacctacaccccagtggcgtttgacctttcaaggcttgcccagtatgaccgggaaggggtggaagaattttgcagacaatgggggctggatgtgccaaaagaatcggaaaaagaccaagggaaacttacaggcaaaaagaaaagagaaagagagagataaaaatatatggaagtaaaaatgaataaagaaatccgtaactatcaggagtccatgtttatggggctgaatttgcgccagtgtatcttttccctacttgccatcgctgtggcagtagggatttattttggtctgggagactatgtggggcaggaaatgaccgggtggctgtgtattcttggtgctgcccctttcgcagcctgtgggttcttccagtatcatggcatgaatgcagagcagtttgcctgggcatatatcaagtccgaatttttataccccaagcgattgctgtttcaaagcgaggatctgtaccatgcctgcatggaagagactatgagtcttggagaaaagaccaggggagatggcgctgttcttttgaaaaagcgggaacagcgggcaaggaaaaaacagatgaagcagaaaaagaaggcaggaaggggtggtgcgtttgattaaaaccttacagcaggcattaaaaatggaccgggagaagttcaaagtcccaaggtctgttcagcaggcgattcccatccagcggatctggccggatggggtgttccagtccgggacgaaattttccaaatcttttcggttttcggatatcaactatgccattgcaagcaaagaagataaaacggaaatgttcttagattacagcgagttgttaaatgctttggattccggcgcatctgccaagatcaccctgaacaacagaagaatcaataaggaagagtttgaagcctccctgctgttgccgatgaaagaggacgggctggatacataccggaaggaatacaacgaaatgctgttatccaaggtcagcggcaccaacaacagcatttatcaggaacggtatctgacggtcagtgtccataagaagaacattgatgaggcaagaacctatttcgcccgtgtgggaacggatatcatcacccatctgagcaagctgtcctctattggggaagaactggatgcggaacagcgcctgcagatcttccgggatttctttcaggcagatcagccccagtgttttccctttgatatgaaggcatttgccaaacgggggagcagtttcaaagactggatttgtccccagtccatggaattttccaaagactgtttcaagatcaacgagcggtacgggcgggtgctgtatatgcaggattatgccagttatgtgaaagatgacatgatttcggaattatgtgatttgagccgagatttgatgctgtccattgacatcctcccggtgccaaccgatgaggcggtaagggaaatccagaacagacttctgggcgtggaaacgaatgtgaccaactggcagagacgccagaatgccaataataacttttctgccattgtgccctatgacatggaactgcagagaaaagagaccaaagagatgctggatgacctgaccaccagggatcagcggatgatgttcggcatccttaccatggtgcatatggcagacagcaagaaacagttggattcggatacggaaagcatcttatccgtggcaagaaagcatttgtgccagatggcaactttgaagtggcagcaagtggatggcttgaatacggtactgccttatggcatccgaaagatcaatgccctgcgaaccttgaccacagagtccactgcagtattgatcccgttccatacccaggagatcatgcagccgggtggtatttactatgggcagaatgcggtgagcaaaaatatgctggtggcagatcggaggaaacttctgaacggaaattctttccgtctgggtgtcagcggttcgggaaaaagtttctcagcaaaagaagagattgtggaccttgccttgtctacggaagatgacatcctgatcttagatccggagtctgaattcggttcactggtggaagcactgaatggagaagtaatcacaatttccgccacatccaacacccatctgaatgcactggatatggattctgcatatggaaacgataagaatccgctgattgaaaagtcggaatttatcctgtctttgtttgaacagttagtgggggctggcaatctgtcggcaaaggagaaatccattctggaccgctgtaccgcagatgtgtaccgggactatatccgaagcggttatcagagcgaagcgcccaccttgaaagacttgtaccgccagctcatgctccagccggaagaagaggccagaggacttgccttgtcttccgaactgtttatcaatggaagtctcaatacctttgcacagaaaaccaatgtggatacgaagaaccgtatcattgcctatgatatccgggaactgggagagcagctcatgcccctggggatgctggttactttggacagtattttcaaccgtgtgatccagaactggaagaaaggaaagactacctggatctttgccgatgagttttatctattgttccgataccaatatagcgctgactttttctaccgcctctacaagagaatccgtaaataccagggatttgtcacaggtttaacgcagaacgtagaggaactgttaaaatccgatacggcaaggctgatgctggcaaacagtgagtttttgatccttttgaatcaggcaaccacagaccgggatgaactggcttcccttttgaatatttccgagaaccagttatcctacatcaccaatgtaggcgcaggaaagggactgatccggtgttccggaaatctggtgccatttgagaacagcttcccgaagaatacgaagctgtaccgcttgatgacaacgaaaccgggagagtgttagtcgaaaagatatttagggtgctgctggaatttcttcggcagcatctttttgggaaggagggaatgtaaatggaagaaggacaaacagtggaaatccaggaaacgagagaaccgcttcgggagcagggcagtgtccgggcattactggaactgttggaacagcaggggatggagcaggaaaaaagggatgtactttgtatggcagattatattgattccatggaaatgcagctgggaaccgtcctaaaggaattgggagaggtgaagaagcaactgggtgtgatgcaggaaagcaaggtcaaactctttgcggtgaacacaatccagaaggcggaacatcaggtgcaaacacttcgttttcaggtgggagaatttaagacaaagtttgtgaaacgtgcagagcaggcagttgttgattttaaagaaaaggggaaagatgcccttgcctctgcggtaaagggaatgcaccttacgcagggattacaaatacttcagtcttctctgcacagcgtgatgctgtcgatggatcaaaagattgatcgtctgggaagtatggcggaagaactgcatgttgccaaagggcatctgcggaatgcatttctggaagcgggtggaaaagaggtgcgaaagctcacagaacgcaatcccgaacagggaatcatctttcaaacccagaaggtgttattccaatccatgcggagtatccatcagttggaacagaaaacggagcgattgcaacagcagatagggaagctggaagcaagagaaggaaaacaaccgtctgtgaaggataccctgcagaaactgagacaggaacaacaccctttgaagtttggtaaagaagaaaaacagaagtctgcggttcgataaagagaagtttttcaaagggaggtgaaatccatgaaagaaaaaacaaccattacgtttcttgcagcggagtgcggggagttccatgggatgggggaatgtatcgaatgtacatctttaaaagaagccttccggcattaccagagattttgcaaacgttcccctcagatgctcccgtctttggaattttccctgcaccatgcagaggatcctctgtataacgagggagaatatccattagttaccggggagaagggaaaagagttattatcctatgttccctattatgccaatcatccgctggtgcaggaagcagcaagggaactggaacagctggagagtcagcagaagaaagcaaaaaagcggggaagggaacgttagaaagtacagaagaagggaggtgtgtgattgaaagatatcaaagaaaaagtgcgggatcaaagtccaaagatccgcaatccagcctcccggcttccgaaagaactggtgcgttctgcgatgctggagacaaaagaaaagaccagcatcatggcagataagctcggaagagaaacgggagaggaatccccggtagaatatgccggaaaccgcatccagcgtgtggaacagcgagtgggaaaggaaagtgcttcggcagcctatcgtggcggtaagaagctggcagtgaaaacttatgagaagttaaaggagcagaaacaaaagcagagagaagctgcgacagcccctttggacggagaaacaggaacgggtggcacatccgcccaggcagggcagtcaaaggcaaagaaagggcgaacagaagccaaaagaagcattaaggccaggccggaagcagagaaaacgatcaaggaagctggaaatcggatggtaaaaacagcgccccgtgtggtgaaagcctctccggtttcttcccagaaggtgaaaacccaggcagtcttacagaagaaacaagcactcaaatccatgaaagcagtcagggaagcgaaacgggctgccatgcactctgttcagactgccaagcaaagtgcaaagactgcaaaggcaaccggaagaggattgaaagccatggcagaagccgccgctcatgcagtgaaagctgcatttgcagcattgatggcaggtggaggcgcagtgtttgtcgttctgattctgattgtggggattattgggggtgcagcctttttgggaaattcccagagcagtgaggctttaagcgcagaagtgctggcacatacacctgccattcaaaagtatgccagtgaatttggcatcccggaatatgttcctgccattcaagccattatgatgcaggaaagcggcggcaggggaacggatcccatgcaggccagtgagtgtccttataacacccagtatcccaatacacccggtgcgattcaggatgctgactattccatcaaggtggggatacagtattatgcagattgtgtccgggaagccggatgccaaagcccacaggatatggacaagctaaaactcagttggcagggatataattatgggaatggatatatctcgtgggcgttggaaaaatttggcggttacagtgaagccaatgcgctgcagttttcccaggagcaggcagctgcccatggctggtcggggtatggtgatccggagtatgtgcctcatgtgatgcggtattattccggcggaggttggtttaccggactttttggaaacaggcagcttgtcaccattgcgaaaagccagcttggaaatgaaggcggagagaagttctggtcatggtggggatttacagagagacaagaatggtgtgcttgctttgtcagttggtgtgcggatcaggcggggctcattcaaaacggagctgtacccaagttctccctttgtacagatggaaagaattggtttcagaaccaaggaagatggcagggggctggaagtatgccaagtcccggtgcgatcattttttttgattgggatcacgatggaacgtgcgaccatgtaggaatcgtggaacgctgtgacggaacaaccgtctataccatagaaggaaactcaggggatgcggtaagagagagaaactatgcgatcaattccgattccattatgggatatggaatggtagtttattagaaacaggaaaatgaatgatagatggaattgtagagtttgaataacaatgctataataggaaatgtgggcagggcagatgtcctgcctgctataaatttgaaaagtacaatcatcagattgagaacatagagtcattggggagtgaaatatttgaaacgggaagaaatctttgaatatgtaagaaagcaatatggaacagttccggagtatctctgggaaacatcaccggagagtgcagtgcttcggcataagaatggaaaatggtatgcagtattgatgcaggttgaaaaatctaggttgggattagaagaagagggtatcgtggatgtgatcaatgtgaagtgcgaaccggatatggtaggacttctgacacaaacgtatggctttcttccgggatatcatatgaataagaagtattggatcacgatgctgctggatggaagcgtaagtgaggcgaaaatcttagactttctggatctgagctatgacttgatagatggaaagaactagagaaaatttataagggaagatagagacagatattgagaaacccatgctgctgcttttcataacagtatcatgggtttctttatcaaggggacatcgaattgtggacaagggaaaaacagcaaggtaaaataaaacagaaaaaattttatttcgtgaggtttctgtgacatttgggtgatactctaaaaagaaaaggatgtgataccatgcatattttagtagtcgaagatgaccacttattaaataatacgttatgctacaacttaaatgccgccggttacaaggtggattccgcgctctgtaaaaaggaggcggaacattatattgagaaacagaaatatgaattgattgtactggatgtgaacctgccggacgggaatggatttgatttctgcaaggaggcaaaggagcgctgtccggagactgcggtgatttttctgaccgcaaatgatatggaaagcgatatgttaaaaggctatgaactgggagccgatgattatgtaacgaaaccatttcccatgagtgtgtttcagaagaagctggcggcattactaagccgcattgcaaagcagtcggaagaagatcaatataaggacggaacactgtttattgattttaaagaaatgaccgcttcactggcggggaacgcgttggtgtttacccctctggaataccgtctgctaaaaatctttacgaagaatccacaaaatgttttaacccggcagatgcttttggaaaggttatgggatattgacgagaactttgtggatgaacatgcgctgacggtagcagtcagcagagtgagaaacaagattgagaccaacggacagcagtatatcaaaaccgtttatggcatgggatatatgtgggtgggaggtgtgcagaagtgagacaaaaaacgtatctttccatcaatcatatctgcctcttcttaggactggtattagggatggcagccatggggagcagcatattggtactatggatcacccgaaatgtaacggctgccttgtgtgtgctggtttttggcgtgtttgcctttggatgcggcgtgctctttgtatggagtatccggaaaaagctggtcttgttttcggaccagctttgcgaactgctggacgggatgatgtccgggaaagaggaactgccggaagagagacagcaggaagaagggctgttttataaaattcattatcgtctgaagcgattatatgaagtcatgcaggagaaccggaatcatatcgcaaaagaacgggaagatttgcaggaattgatttccgatatttcccatcaggtaaagacgcccattgccaatctgaaaatgatcaacaatacgctgttggagcaggaggttccggcacagaaacagcatgaatttttaacagcgcagagcagccagttggataaattggattttctgatgcaggcaatgatcaaaacctcccggttggaaacgggtgtgatttctctggaacagaaagaacagtcgatctatgagacgttggcggcagcgttagggggcattttcttaaatgcagagaaaaagaggattgatgtgcaggtggactgcccggagcgactgctggtttcccatgaccggaagtggacgacggaagcattgtttaacattctggataatgcagtgaagtacacaccaacgggtggaaatatctgggtatctgtggaatgctgggaaatgtatgtaaagatcgacattacagataatggaattggaatttccgaggaacatcagggaacgatcttcaaacgtttttaccgggaagatacggtacacgatgcggaaggaatcgggatcggtctgtatcttgcccgggagattatttcccttcagggcgggtatattgtggtggcttctgagccaggaaaaggttctacgttttcggtgcgtctcctgagaaaatagaagagaaagttgaaatgtcacaggattgtgacatttcagccccaaaaacaccgaaatttctttgttttcgtgacatttctgtgaggtttggttgttatgataaggataacaaaaagaaaggacggtgttcatatgaatatcttagaaacgatggaactgaaaaaatattatggggcagagccgaatatcacaaaagcattggacggagtgaatctttccgtagaaaagggagaatttgttgccattgtgggaactagtggcagcggtaaatctacgttacttaatatgataggcggtctggacgttccgacttccgggaaagtttttgtggatggaacagagttatcaaaactgaatgaggagcagttgaccattttccgaagaagaaaaatcggattcgttttccagaactacaatctggtgccggttttgaacgtgtacgaaaatatcgcgcttccggtagaactggacggaggaaaggtagacaaaaattttttagaggaagtcgtgggatttttaggactgaaagagaagttaaacagtatgccgaataatttatccggtggtcagcagcagagagtggcaatcgcgcgtgcgctgattgcccgtccaacgattgtgttggcggatgagcctaccggaaacctggacagcaagaccagcatggacgtgttgggtctgatgaaaacaagcagctacaaattcaaacagacccttgtaatgattactcataatgatgaaattgctcagcttgctgatcggattatccatatcgaagacggaaagatcgtacagtaagggggcgggactatgagtgatgttctatttggaaacaataataaggcagtaatcaaaaaggtggcgaaccgcagctttcacagcaataagaaacggaatatccttgcagtcatcgccatcgccctgaccacgtttctgctgaccgcagtgctgaccatcgggtttggggcaaaaaataccatgcagtatagtgaggcgagattattaggttcgcaagcggacgctctggtacagggaatgacaaaaaaacaggcagaacagctaagagcgaatagcatgtttgaaaaggtgggaacccagattgcactggcatttttagaaaatacaaagcagctcaatgtggaaatggattatgtggacgaaacacttatcgaagttcgttttatgacaccgagtatcggaaccataccaaaggctgaggatgaggtactggtatctgcgaatgtgctggaagatctgggaattccacaaaaagcaggggagacattgcctgtcgatttaaaagtagacggaaaaattgaacattttgatatgaaagtatccggtatctatgaaccggtaaaagatgatgtaggatatgtgatggtttccaaagcatttctggatgcgcaagaagacctggtttctgttcttcggaaagatagagaaaatgggaactattataatgcggatgtaattttgaaagatccggcaatggcagaagaacagattggagagcttatccgcagtattggaggcaatccggatgatcgggaagcagaaaattatgtaaggattgcaccgaccacatctgctgcacagagtgatgggaatttagcggtatggatggcagcaggtgtgtttggaatcttgtttatgttctgtggatatcttctgatttataatgtctttgatatgggagtgaccaatgacgtcagacagtatggacttctccgaaccatcggaatgacaccaaaacaagtgaaaggtctggtgcgaaaacaggcaatgtacctgttcctgatcggtacaccaatcggagtcgttctgggaatcttacttgggaaaggaatgcttccagcagtgcttcaaatgtttgtagcggaactgggagaaaaaaatgtggttgtcggttcacttccatatcttccaattattatcggttcagtcatattttctgcgttgaccgtatggatcagtacgaggaaatcagcaaagaaggcgtcccgcgtctctccgattgaggctgtccggtatgtggaacagagtacaggaaagatcaaggaacgcaagcacgtaaaaggggcgttacttccacgcatggcaaaagcgaacgtgcagagaaatagaggacgaatggtattggtcattgtttctttgatgttaagcattatcttgctaaattccgtatttatttttacaggaagttacgatgaggaggtatatgtagaacgaaatatgcgaagtgattttgcagtctatacagcagatgccggactgatgcagaaagggtttaccggacatagcgccgcattaccggaagatgtggcagaagcagttacacagcgcccaggtgtaaaaaatgtgacaaagatgtatcggaatacctttgaggacagccaggtttcctgtgattggggaattacttatgaagtagacgaaaaagcgacagaaatgctgggatttcctgataatatcaaagagggaaaaaataaaaagggagaatttatagatgaacagcatgcagcattgacaccggatggaagaccacttggaaatgtgtttggtgtttcggattctttaattgatgaactggacatccgagaaggcgaaaaagataaatcgattctaaaagaaaagcttcaaaatgaaaatggaattattttaatttctagctacaatgacgatggaggatttaatgaatattcagaggccgcatatgtaaaacagcaggtaggggatcaaattcagttttatgaacatggtgttccgacaaaaacgtttacggtactcgcaaaggtggctacaacagatatggaaggaggaactttgcttggaccgggaggtaatataatgggtagtattggcggacctattatgtatatgtctgaggaccacttcaaagagctatacgaaaatccatccctttactgtgttctgtttgatacggaagaagaccatcgacaagagatggaagactatttatcagagtatacaacccagaaaaatacggatgttctctatcagtcagtagataaattaggtgctaccgttcagacaatgaaaaatgcaactctgttaattggtggtctgatcggaggaatctttgctttagttggtatcatcaatctgatgaacctgattatgacgagcattgtgacaagacgacatgagtttgcgtctatgcagagtgttggaatgacaacaaaacagcttcggaaattggtgatgacagaaagtctttcctatgtgctgcgggcaagtgtaatcggaattgtggttgcagtgattttgggagtagcagttgtgaaacctttagtagagagtggttttccgttctggtttatgacttttcatctgaccatccttccggcaattttgttatctgttatttatattgtgctggcgcttattattccgatggctgcccttcgatttctaaaccgacagagtattgtggagcgtttgaaaacaggagaatagtttccagcagagatataacaaataagaaatacaaaatgggaggtcgttctatatggcaatacttgagacaaaagatttacgaaagatatatggtagtggtgagaacgaagtgcgtgcactggatggggtatcgatttccgtagaagagggcgaatttgttgcagtagtcggtacatcgggcagcggcaaatctacactgctcaacatgattggcggtttagaccgccctacttcgggaagtgttacaatccggggaaaagaacttctgaacatgaaagatgaggaactgacgattttcagacgaaggaatatcggttttgtctttcagaactataacctgcttcccgtcctcaatgtgtatgagaatattgtatatcccattgagattgacggtggcaggacagacacagactttgtgaaagagattatccatgaacttgggttgcagaagaaactgaggaatatgccaaataacctgtcaggcggtcagcagcagagagttgcgatcgcccgggctctggcaacaaagcctgcgattattttggctgacgaacctacaggcaacctagactctaaaacgagtatggacgtgattctgctgatgcagtcactcagtcatgagtttgaccagacgattctgatgattactcataatgaagagattgcgagaatggcagaccgtatcattcgcattgaagacggcaaagtcgtttcgggaggtgtgaggtatgcacgctaaccggaatgaaaaagcagtaaagcgtgtgaaaagaggaatgatgaaagcaaaccgcattcggaacttgtttgcggtatttgccatcatcctcaccacatttatgattaccaccgtattcagcttgggtattaactatggggagaacatgaagttaatgcaggtccgcaccgcagggacaaccgcagatgtgtcccttgcgatgccgacgaaagcgcaggaacagcagattcgggacttggaatacgtcaaaacggtggggacacagtacatggtcggctctgttgcagagaagaatgacgagggacgggaactttccatcgcgcttcaatattacgacaagacggaatgggaagaacattatcaagaagcaatcaaagatttggaagggaaatatccttccgaggaaaatgaaatcatgctgtcagaggatgccctttcacagttaggaattacagaaccgaagttgaatatggaagttcctctgtcctactacgacaaaaacggggagcaggagagaacattcaccttgagtggatggttccattcctacacaggcacaggaatgggatttgtttccgaggcgtactgcaaaaatgcaggctatacaatggcagaggatggtgtcctttctttatcgctgaagaaaatgccagatgattttatgcgcattcaaagagatgtaaagttaaatgaaaatcaatcttttagcggtgcggtttccatgaaatcatcaagcggttctgttattgcaatggtcattctattggtattctttatcattggcagcggctacctgcttatttataatgtcctgtatatctctatttcaaaggatacccgtttttatggcttgatgaaaacgatggggacaacgcaggcgcagatcaaatcgttggtgaaaagtcaggcagtgaagtttgcctgcatcgggattcctattggtattttgttagcgactgttgtttcctttggaattgttccctttgttttgaatcaaggatttgaggaaggaaagtcgatgatggatgcagaggtgttttttcacccgatgatctatattctgtccatcctcttttcagcaataacagtttggattgcctgcaatgcaccggcaaaagcggctgcgaaaatttcaccagtagaggcgctgaagtttcagaactttgcaccaaagaaaatgaaaagcagaaattccaccaatggtggcaagttgcatgtaatggcatttcataatgtcttccgggataagaaacgtgcaatccttgtatttatgtctctgtttatggggatcaccatgattttaggtgtaaatggagttataagaagtatgaatgccgaaaattttattaaagcaactctggattatcattttgaatacagcgatattcagtttgagcagccggaacagcttaacaaagaagtaccacagtttgatgaacattttgtagaacagattcagcagattgatggtattaaaaatattgatattcataagacagtctgggcgggcattgattttgatgaggcggcattggcagattttatgaaaatcaaatatgaggacagcggttataaatcacagggaaaatcctatgagcaaatgctgacagcgttaagaggatatgcagatgccggtgagtatggttgttacattacgacgcttaataatgaggaagctttggaagaatacaatgcaaatcacccggataagccgattgacatagaagcgtttaaacgaggggaaacagcaatttcgggaacggataacgattattatacgccgaatgcagccttagtcggaaacacgctgacgttgactgccgacagtacagatggaaaggcaactgattttctaattgacggagcatttcgatatgatgattatgaggataggcttactgaaggaattggtagacgtaagcatattgagattgtaccgaatattatctttgttagcgaagcaggtatggaacgcctgacaaaagaaccgattatttctgcaatcggtgtggatattaaggatttcaatgacctagagagaattgatagtgaattacaggcaatcaacagtaccttaaccacatcagaatggcagcttctatctgctgtgaatcagaaagaactatttaatcagacgttctattcgatgaacctattgggaaatggtgcggcagtcctgctcattgtcatcggtttggtgaatttcgtcaatgtgatgctgaccggtgtagtagcaaggaaaaatgaatttgccattatggaaagcatcggtaccacgaaaaagcagatcaggaagatactgaccttagaaggcggtatttacgcgctgatttctactctgctgatcatgacctttggtaatgcgtttctgctgctggtggcgaatgctgttccccatctggcaaattatgcagtatttgaatatccggttgctcttgtgatcggcttgatcgcagcaatctttgtaatctgtctgagcgttccggcgattgtctataaggcaatttcagatgaaacggtgattgaacgactgcgtaattttgagaattaaaggagttgaaagaacaggagggatcacttgaatgatatattatttggcaacaacaatacagaagtaatcaagcggttatccaagcggtattttaagagaaacagaatccggaatcttgcggcgatactggcgattatgttgaccgcgtttctgtttacttccattacttcgttagtatttagcatgtcctcctccattcagctttccatgcagatgcagaaaggaagtaaggcggacggggacatccggtatctgacggaagaacaatatgaagagttacaaaatagtgattttatcaaggaggcaggatgcaggcggtttgttggctttgcatccaacgcttccgggcatatggttgagataaactatgcagatccggtacagcaggaactgaccttctgtacgccgacacatggaaaggctccaaagaaagcaaatgagattgctacaacagatcaggcgctggaggcgttgggagtagaggcaaaggtgggggaaaccgttccggtggaatttaccttacgtggagaaacctatcagtatgaaatggttgtttccggctggtgggaagctgccaatgataccggaagcctgctgattgtttccgagcagtttgtgaaagacaatccggaaatatttgtaaatacttatgcagaggaccgggagattgcaggaacgtatatggcagatgtggtactgaaggataagcgacacatacagaagcagttacaggaatttgcactttccgtgggcggagaaccggaacagatgaatgcagacaattatattgcctgttcacaaaatcaggtaggaaatgccatgcttcagccgggcatgatgctgtcagcggttgtatttgtactgttgtttgtcgtgagcgggtatctgctgatttataatattttcgatatttccgtgatgcaggacgtaagacaatacggtctgctccgaaccatcggaacgtccacaaggcagatcaaaaagattgtgaaccggcaggcactttggctgacgttgatcggtcttccgctgggattactctttggatttctggtaagcaggatgcttcttccggttgtgatgaagttttttcaggcaaatgctttgaatgccatgaaagtgtccgtgtctccgcttatctttctgattgcggcagtgtttacgatttttaccgtaatgatcagtacacggaaaccggcaagaaaggcggcgcggatatcccctctggaagctatccgttataccgggcaggaaaagaagaaaatgaaagagacaaaacggacacatggaacaaagctgtcctatatggcattttccaatcttggcaggaacaaacggagatccgtttttattgtcctatccatgctgttgtgcattgttttatttaattcgattattgtgatcacacagagtatggatgaagaaaaatggatttcccgttctacgaaaacagactttaccgtttacaattccgtggcagtcaatggagtttctccatttcagtatcgagaagacggactcccggtttcggtagtagatctgatcgatcagcaaaaaggtgtggaagaggaaagaattctgtaccggaatacacgagatgatagtgatgtgacgatagattataagtttgaagatctggtttgcatcgcggaggaggcagaagaagattctgtcagcaaagcgtatgaaaacggattgtctctgcgggtagttccgggaacagaagatggctattttggaaatgtgtttggcgtttcggaagcattctgggaggatgtcacgatttatgaaggtgagaacaatccggatgttttgaaagagaaaatggaaaccggagattatgtgattgtcggaacgatcatagaccgactgaccggagaggcggaagaagagacgcagctgcagcaacagcttcaagtaggagatttcattacgttttccaaagatggaaaagaagaaaagacttgtacgattttagcaaaagcaacggttgtagcaacggaatacgaaacctatgctggtgcaaatggagcagcctacattggcggcgatgcgccatttctttatatgagtgacacaaagttcaaggaactttatgaagagccgacgattttcagttacagctttaatgcagaagaaggggaaaaagagaatctggaaggatttttagcggactttacgggagaaaatacttctgttgcctatacatccatcaagctgttacaggagcagcttgcgtccaatcggaacattgttctgctggtaggcggtatgatcggagtgattctggcatttgccggattgattaactttaccaatatgatggtcaccaatatcattacccgccgccatgaatttgcagccatgcagagtatcggcatgacaaaccgccagcttcgcagactgattgtggatgagggcttatattatgcggcaggtgcagatgtaatcggcggtctgcttgcagcaattttaggaatgacagtattaaagaacgtactcaattccccatctatgtggtattttaccctgcggtttacactggttccggcattttttatcgcagtgatctatttgatcttggcggcggtaattccagtggttgtcttacatttctttaataaaggaagtgtggtagaacggttgcggacagcgcagtagacaagagaaaaaacggaagacggggatgatgcaattttcaaatttgaaagaatacggattgatttaaaaagcagacaggtacacattgatacaaagttgattgttttgcgaagaaaagaatttgatattttatcatttctggcagaacatccgggctgggtgtacacaaaggagcagatctatgtgtcgatttggagagatgagcacccggtcaatgtggataatgcagtgacctgtcagataaaacagcttcggaagaagctggggaataatcccaaaggaacgccctatatcgagacggtttggggtgtgggatataaattcaatcagggaatgtaaggagaaagcggtactgggaattgggcagtaccgcttttgagtttgaaaaataaagattgtgataaacttgttattgagggcatatctgactataatgttactaaaaagaatgatcgatgatagaaatgtggattgatataagaacagttgggagtggaattgtgctatgaataagattttaatcatagatgacgataaagaattgtgtacgttaattaaacggagtgtgctttcagaggaaatcgaagcagatatttgtaattcaggaagagaaggaattcaacagttaaaagaacagacgtatcagcttgtaattttagatgtgatgatgccggggatggacggatttgaaacattagaagaaatccgaaaggaatatagtttgccgattttgatgtttacagcgaaaaatgacagtgcatctaaagtaaagggattacgagcaggtgcagatgattatctgacaaaaccatttgatatggatgaattgattgcaaggattgtgtctcttatccgccgctatacacgttttaatcagcaggaagacatacagcagcttacttttgaaggtctgaaaattgatattgataaccgttgtattacaacggagaatggaatatttgaacttccgcctaaagagtttgatttgttgttgttttgcgcgaaaaatcaaggcaagatattgacgaaacagcagatctatgaatctgtttggggagaagagtatgtttatgatgacagcaatattatggcaattatcagccggcttcggaagaaactagaggtaactccgggaaaaccgaaatatattcagacgataaaggggatcggataccggtttaataaggaggtatgagtatatgcaggtgatgattggtttattagttggagtatctatcatagctatattatcagtctgctttattcttcgtcgtgtaaaaaagcagattatggaaatgacagaggcattgcaggatgtaaaagaaggaaatggaaaccggcgaattttatcagcagcgaatgagttagttgctccgcttgcttatgaaatgaatgaaatcattgtatcttatgaaaacagactttctaaagtaagacagtcagaagaaacaaatcgccagcttatgaccagcctttcccatgatgtaagaacgcctctcacgacgctgattggttatctggatgcagcacataaaggacttgttacagggaaagaccgtgatgagtacatggaaactgcccgaaggaaagcgtatgatttaaaagaatatattgatgtgctttttgactggtttaaattaaactctgatgaatttgctatggaaatcgaggaagttgaagttgcagaactgacaagaaatattttgatcgattggataccagtatttgaagataaacagatagagtataatattgatattccggaacagccattccgagtaaaacttgatgcagacagttatatgcggatattaaacaatttgattcagaatgtgcttgctcatagtcaggcagacagaatcggaataatcatgcaaaagcagagtggaacggtacagattcttttagaagataatggtattgggattgggaaggatgatctgaagtatatttttgatcgactctataagtgtgataagggaaggtctgaaaagggaagcggacttggattatccatcgtatatcagcttgtagagaaaatgaatggtaggataacagtagaaagtgaagaaggaaaagggacagtatttactgttacatttccgctgctttaggactctcgcttttgtggcgggagcctttattttatacggattgttatcattgtgtaaaagagagaacgaaatgcaaggttaatgcaagagctttgcaaggttcatgcaagattggtgtgatagaatacttcacagaacaggaggtttgaatatgaacaagtacattattgaaacaaaaaatcttacgaagaaatatggatcacaaaaaagcgtggctgacttgaatatccatgtgcagaaaggaaggatttatgggctgcttggaagaaacggagcggggaaaacaacgactatgaaaatgctgctcggacttacaaaaccaacgtccggcgaagtgaaaatatggggaaaatctttacaaggaaatgaaaaaaagctattgccacgcatcggcagtctgatagaatctcccggattttatccgaacttgaccgcaactgagaatttgcgtgtttttgctacacttcgaggagttccgaacaatcatgcaattcaggatgctttggatttggtgggcttaccttacaaagataaaaaattgttttcacaatattctctgggaatgaagcaacgtttggcaatcgcacttgcagttatgcacgatccggaattattgattttggatgaaccgatcaacggacttgatccgattggaattgcagaagtacgttcttttattcgtgaactttgtgatctgagaggaaaaacaatcttgatctcaagccatattctttcggaaatcgcattgctggcggatgatattggaattattgatcatgggatcttgctggaagaggagagtcttgcagaattagagcaaaaaagtagtaagcatatccgctttactatttctgataccgcacaagcggcaagaattttggaacataagttccatgaaaatcaattctcaattcaggatgatcataatttaagactgcataatcttgatttgccggtaggaaaagttgtgacagcgtttgtagaaaatggactggaggtatcagaagcgcatacttgtgaagaaagtcttgaagattacttcaagcgtgtgacgggaggcgagggaattgcttaaactagtgaaatgtgaatttttaaagctgaagcggaaaaagtttattccgctggtgatattagcagcctttcttttcccgatcccattgacatatttaatgacaactccgtctatgatggaacgatatgtggataaagcagacgcatttgacggattgtttaatatggtgcttggatatggtattcagtttttgctaccttgtttgattggtgtgattgcggcaatgttattttttatggaacgcgataatgatacatttaaaaatctgcgtaccattccagttaccagtacacaaatggttcttgcaaaaatacttgtattatttttctttggcatcattttttgtgtagcgtctacgattgtaacgattttatgtggatttggtacgttagaagtgtatggaattggatataagttgtttttagcagttgaaacaggaatttttattactgccggtacactgccactgattgttttagttgtctttttcagtaaaacttacgttttttctattttattgtgtgtattttacagtgtactgaacatgagtgccactgcattatttgatgcgttgccgaaaacaattttgtggatattgccgacaccattgactacattttggagcgccggagatatggcaaaacatggaattaaaatggacttggaacagatgacaggtttgatcccatcaacttttcaggtagtggttattcttggaatcatggcagttttgtctttcttcgtgattgacaaattatataagcaaaggggtgaatagacatggttcgtatcataaaaacagaattttataaattgaaaaggtatcatattctatgggcgggcgttgcgcttatgttgttatctgttttattgacgttgtttacctctatggcaaatgatggttctgtatgggatttcgcatatttaacagagcaggtgattaaaaataatatgtccatgatctttccaatgtgcattagtttgattgccggatacatgatttcccgtgagcaaactgatgatacattgaaaaatattctgactgtaccggtttcctttaagcggcttctgactggaaaactaattgtatgcggtgtgctgtctatcgtgtttggcttgatatgcagtctgtttacggtaattgcagaactgattgtcggatttccgggctttcatttttcattgatattacaggctgttctacaaattactgcggtaaatttctttttatatcttgcagtgttaccgattattattatcacatcccgaaaatcgggcagctttttaatcggtgttattgtggcatttgtttatggatacggaggaatgtttgcagcaggaaatatgacattagcaaatatctatccgattacagcgagtcttggaatgattcactatcgcagttacgatgcagcagttcgttggaatacggtaacttgtatggtcagtcttgctattgttgttgcaatttccgtagtattgattttatgtatgaaagaaaaagagccgaagcaagtaaagaaaaaggtgaaaaaagctgcaccaaagaaagggtggtgataatgtcagtgaagaaaggtcttgttttattaacattatccctttttggagtttgtacactttccggatgtacaaaagatgaagtcctcgatcactataataatattgttcagtctgtcggatcgtcagaattgaccggaaacttgtttttgcaagggaagaaagaaaaagggatagatgattatactggaagttatcaggcagattataaagatttttccgatacagaatatctgtttggcggtacttcaataaaacgggaagcaggaaaagaaatctcaattatatgtaatttagaaatagacgaagggacagcaaaggtattttggagttcaggtgcagaagaaccagtaactttaattgaaaccaccggagaatacgagaatactattacacttccagatggcggaaattacataggaattgaatgtgaaaattttacagggaatgtagaaataagtgtaaaataaaaatcttttaaccattagaatgtagaaaacttttaagtggggagagcctagaggcgggtgatactattttcattttcggatcgttagttattgatttaaaatgcaggaaggttcaaatcgcttcccggcagatagtgttgagaaggaaagaatttgacattctcgctcttcttgcagaacatccgggatgggtatatacgaaagaacagatttatcaatcaatctggtgtgaggaagtaccggttgatgtagataatgcagtgacctgtcagatgaaacaattacggaagaaattgggagagaatcccaaaggcacaccttatatcgagacagtctggggtgtgggatataaattcagtcatgggatgtaaggagaaagcggtactgagaattgggcagtaccgctctttttcctaatgccaggaaaagaaaagaggataccgtgtaatagccaaagagcataaaagtaatatcgttgattcataaggaactggttccgacttccttgtgcttcccaacttgtattatgtgagagtacgaattataatatagcaatacggaggtgcaatatgaattatataactttgaaagaagcaagtgaaatatggggcatgactcctcgatggataaattactattgctctgcatggaatattccaggcgcagaaaaaatgaggatggtttggctcatcccaaagaatgcgaaaaaaccattagatgaccgaagaaaatctagtaggaaactagaaggagaacatcatgattgaagtttattatacggaagatgatgaaatcattggaaaatccgtaaaggaatatttagaacagcacaattgtaaggtgaccctttgtgagtcgattgccgataccagaaaagcgttgctcaaccatttgcctgccgtcgttttattggactggaatatgccagatggtcatggaagcgaattgtgctgctggattcgggaaagatggaaagctctccctattatctatttaacagttcgtggggactcacatgatattgttatgggattccagaacggagcagatgattatgtggtaaaaccatttgaccttgctgttttatattctcgtattttggcattgctgcggagaacagaaaacatagcagacacaaagttgttttgtgatgacttgatgttggataaagagaaaacggctgtctatgatcaacagaaagaaatcatcgtaagtcagccagaatatcgtattcttctggcactgatggaaaataaagggaaaaccatcactagaagtcagttattagagcaggtctgggatcacagcggaaactatgtaaatgacaatactttgactgtcgctatgaaacgacttagggaaaagttgggcaatcccgcttgtttgaagacaatccgaagtttcggttatcgcatggaggacacaaaatgaggggaaaattgaaacaaagaattcttttgtttttcccatttgttgttcttatgatgggaatgatacttacacctgttttatttttgcgcacttaccggcagatagcatttgagcacacttcggcattatgtgaaatcatattggaaaactctcccgaagcagaaccacagctattagcgtccctaaaagactatcaatcattgaccgaacaatcactaagagaaaacaattatctggaaaaatacggataccgtactgatgatttttgcaaaggatttccgccggatacgttcctttttccaattctgctttttcttgtagccgcctgcgcctttgcattcggaatcttacagttccgcaagaaaaatcgaattcggattgctgatttaaccgagtatttggagcaagtcaatattgaggcaggggggacattgatacagacacaggaagatgattattcacatttacaggacgagatatacaaaaccgttaccacactttatcaaactagagaaacggcagttaccgcaaagaaaaactttgcagaaaatttagctaatattgcgcaccagctaaaaacgccgattacggcggcatttttatctttacagattatgaaaaaagaaggaataccagaaacttatgcaattcagattgaaagacagttggaacgattaaatcgtttggaagaatctttcctaatgctttcccaaattgatgctggaacgctcccgctcaaatgggaaaaagttgatctttatacggtgttaaatctggcggccgaaaacctgagcgatctattgcgaagatacaatatttctgttgatattccagaaaatggatgcattgaattttggggggatctggaatggacaatggaagcatttattaatctcttgaaaaattgcatggagcattcccaaccaagcgggacagtccactgcgtctactcaggaaatcctctttatgtagaaattcggatatgggatgatgggactggttttgatacagaggacttaccatatcttttcgagcgtttttatcgggggaaacgtgcagttggaaatggtatcgggattggattggctcttgctcgttctatttttgaattgcaaaatggaatcataaccgcttataatctgcaaaacggtggagcttgttttgaaataaggatatacagtcactgagatgtcactttactttgctatactgcatacaagaccatcaggtagaaaggagaaagtgacatggaaatactaagatgtgaaaatatccgaaaagtatatggttcaggaagcaatcagattgtggcgctggatcacattaatctgtctgtacaaaaaggagaatttgtagcaatcgtaggagcatccggttcgggaaaatccactttactgcatattctgggaagtgtggataagccgacagaaggaaatgttttgatagatggaacaaatatatccacaatgaaccgaacggagacggctatcttcaggcgcaggaaggtgggactaatctatcagttttataatctcattcctaccctcactgtccgaaaaaacattcttatgccgctcatgttagacaaatacaaaccaaatccggaatactttgaccagattgtatattcgctgggaattgaagataaactggaagcactgcccagtcaattgtctggcggacaacagcagcgtgtggccattgcccggtctttgatttatcgtcctgcactattgcttgccgatgaacctaccggcaatcttgaccggaaaaatggaaaagagatcatagatttgttaaaattatccaaccgcaacctggatcagaccattcttctgattactcatgatgaaaagattgctttggaggcggatcgcattataaccatagaggatgggaacattgtcagtgatcagaaaaggaggtaaggatatgtggaaagactattcgataggttttatcaaaaagaatcgggcttccagcttatcagttcttgttgcggcttttatttctgctctgtttctgtctttgctgtgcggtctgttttataatttctggaattacgagatagaatccattaccttagaagaaggagactggcaggggcgtattgccgggacatttgaaaaagatgtaatgtccgatattgaaaactttgccaatgtaaaaactgctgtaatcaatgaacaattatcggatggacaaacccttgtggttgatatttgttttgataacatgaggacagtgtatcaggacatgcctcttattgtagaacagttgggtgtccttgatagtgctgtgtcttatcatgaatcgctgctgtcaggatatttcatccacgacccacaggataccaatccccccttattgatggccttttatttctttgtgcttctgatggtatcagcatctttaattttgattattcataattctttttctgtatctatgaatgcccgtgttcatcaatttggcattttttccagtataggggcaacacctgggcaaattcgtgcctgtctcttacaggaagcgatgtttctttgcgtaatccccattttgctcggcagttttattgggattgcattgaccttgggaatcatacaggttgtgaatatccttgcagatggtattatcggcaggcatgaagctgtctttacttaccacccattcgtatttgcaatcacaattctggtatctcttttaactgtattgatttctgcatggctgccagccagaaaattaagcacactaactcctctagaagctataaaaaacacaggagaattgcagttaaagcggagaaaaaaatctcgtattcttgcgtttttatttggaatcgaaggagaacttgctgggaatgcgttgaaagcacaaaagaaatccttgcgaacctctactttatcactgaccctttcctttctgagttttgcattgatgctgtgcttcttcacactttcgggaatcagcacgaatcatacctattttgaacgctatcaagacacctgggatgtcatggcgacgattgaaaacacaagtattgaggatttcgcttatgaggataaaatccatgctttggatgatacagacagcgtgatatatcaaaaagcaaatgctctttgctctatttcgacagacgccattagcgaggaattaaaaagcctaggaggactggagacaatagccggaagcgatgtcagtaccgcagacggtttctataccattcaggcgcctgttgtcattatggatgatagcagttttgcaaaatactgtgaacagataggcgttacttcactggaaaacggaagtgttgtcctaaaccgtatttgggacagcataaacagcaatttcagatacaaggaatacgttccttttttgtctgaaaaccaggataccctgattttacagaatcaggaagatacggctgctaccgtgacaattcctgttttgggccttacacaggctcctccagttctaaaagaagaatatgataattatgctttagtccagtttgtttccctttctacgtggaaacagattcagaaaacaatcggaactgcagaaccagacacttatatccgtatgctgtcggaaaaagagagaaccttaacagaattaagtacgatagaaacagcactaacaaatgttctggaccataaatttacatttgaggtggaaaatcgtattcaggaaaagatagacaatgagaccatgctggatggatacaaactgattattggggcgctatgtgcgttgcttgccttcattggaattgccaatgtattttccaatacactgggatttatccggcaaaggaaaagagagtttgcgagatatatgtccatcggcatgacaccggatagtatgcggaaaatctttatcattgaagcgctcgtgattgccggtcgtcccatcctgattacatttccaatcactgtactatttgtagggtttatgataacggcaagttacttgaatccaatggaatttttggcggtggttccgattgctcccattgtgatttttattgtagcaatttgggcatttgttgcactggcatactttttgggaggaaagcaaatcctgaaatgcaatctggtagaagcactgcaaagtgattatatgggataattgtatcgttatgacgaatatgtcatcaagtactttctttaagctaaaaaatagcggctttgaattcctttcaagactgttgttttcttacgacaccaaaatccacatttaccattattgaaaacattggcacaacaaaaaacagatattgacacggcttggggtgtgggatataaattcagtcatgggatgaagtaagagaagaaactgtataaaaaacaatactgtattgttttgggttctactttttagttgatgcttattgactgtattttggaatgacagtagtatagaagaacaagaaggaaagttggtgataatgatgtgccaaagtaaaaaaagaaaaaatgatgctgttctccacgcaaagccagttgaaaagcgacaattgcgtggagtagagaagcgtcgctgatcttatatttctggctttgctgcttagagtaatataaggaggaaagctgttatgaaatatgtgaatgctaacacggttcttccaagtgcattagtggaagaattacaaaagtatatacaggcggaatatctttatgttccggcaaagaatgaacaacgtagagcatggggcgaactgtcaggttataagaaagagatttgtaaacggaatgaaagaattgtttcagaattccggaatggagaaacagttgcatcactcgcagaacgttatcatctttcggtatatgctattagaaaaattatttatcagaagtaattgtagagggctgcattttgtggctctcttttctattatttgagactgtaatgtttggtgtattgagcaggtttacagatgagcataaaatgagattgtaaatatagaaagtgcaggaggactgatagaatggctgatgtgagaaaaatatatccgagaagtggagacaaagaaactgtttatctgaaaaatgtaatttcaaatccgaatatcatagtaggagattatacgatgtatcatgattccatcaatgatccgaaggattttgaaacgaacaacgtgctttatcaatatccgatcaatcgtgacaaactgaaaatagggaaattttgctctattgcttgtggcacaaaatttctttttaatagtgcaaatcatgcgcttgactcattatctacctttccttttccattgttttttgaggaatggaatcttgaaaaggaaaaagttacagaggcatgggacaatagaggagatattgtaattggaaatgatgtctggattggctatgaagcagtcatattatcaggcgtcaccattggagatggagcaattataggaacaagagcagttgttacaaaagatgtgccaccatatacgattgtcggaggggttccggcaaagtcgatccgaaaacgatttgatgaaaaggtaatagaagcactgttaaaaataaagtggtgggattggacagaagaaaaggttgccaggaatatagaaaatattaaaactggttgtatagaacggttgaaataattcataagtatattatctacgaaacttgacagtgtaaagattgaaaggtataatgtttacagtgtaaagttcggaggtggaaaatgaaaaatacaacctatcatcataaaaatttgaggaatgaactgatagagaaggggattgaattagtagaagaatatggtatgcaacaaatttctctacgaaaggtagcgcaggcatgtaatgtgagccatgctgcgccgtacagtcattttaagaataaggacgatttgatttcggcaatgcagagttatattacagatcagtttacggaaagattgcaggatgtgattgcgaagcattcaggaaaacctgagtttttcatggaatttggaaaggcatatgttttattttttcttcagaatccccactattttacctttttatttacgaaaggtaaaatgcagatcaatttagatattcaaggggaaggtgaagaggactataagccattttcaatatataaagaacaggtaatgaaactgcttgctccgttagaactttcagaagaaaagaaacaagattatataatttcattattcgcgtatattcatgggcttacctctttggcaacgcttcaaaatgtaagatatgcctcagactgggaagagaagatagaagatctgatttgcacatttccagtgggaaacgaggtgacaccgtgttaggaatttattttagtggaaccggaaatacagaatattgtgtgaaattgttatcttcacttttagaagaatcggaaacagtttctttagaaaatccatcggcggctaaaaaactggaagagaatgatacgattatatttggctatcccgtacaattttccaatataccgtatttcgttcggatatttatagaggagaatggtgaaatttggaaagggaaaaaggttttttgtttagttacaatgggggcatttagtggagatggagccggatgtgccgcaagattgctggaaaagaaaggagcagtgatcttaggcggagtacatgtaaaaatgccggactccgtatgtgataatccgttattgaaaaaatcttttgaagagaatcaacagcttgtggaaaaggcgaccgaaaagattgaaaaagtcgctttagatataaaaaggcaggtgtatccgaaagaggggctatcttttctgactcatgtgattggattgtttggacaaaggctttggttttatcataaaacaagagcatataataaaaagctgaatattcatgagaattgtaatggttgtgggatatgtgctcaaaactgtccgacacagaatctttcgttgcttgacggaaaggtagttgcagggaatcaatgtacgatgtgttaccggtgcattagtaaatgtccgcaaaaggcaatcacacttttggggaagaaggtggttgatcagcatacgataacaaggtatgtataggtagacattagaggctgaaaactcaccaaataattaccagttttctaccagatttttacccatttattttgtatgatttgattaggaaacattggatgagaaaataattattgcaaaatctaggaggaactgatatgcgaaacagagacatggaggtgtgaagaagaacagaattatagtaattgcagatgaaagcaaattgacaggggaaagtctggtcttattggagcaacagacagagatctatcaggcaaaaggaatccaggatgccctttcccacctgacagttttctcttatcatttgattttgattgcattaaaccaggaaacagaagtaatctgtcaggttgtggaatctattcgaaaaatagtgatgacacctatcatagtgctgttatcagaaatttctaaggggagaagtcgggtgattcatgcaggagctgatgtagcgttgataagaccatgtactgcggaagaaatcagcctacaggcgtatgcattaatccggcgctatacggaatggaaatctgaaagaagagaagaaattcctatcatgcttggaaaactggaaatctttccacttcaaagaacagtggaatgggatcataaaatagtcccagttgtaaaaagggaatttgattttctacatctgttagcgtctacaccgggaagagtgtatacatatggtcagatttatcagctggtatggcaggagtacccacatggggatattacaaatattatttactgcatggtacatcgattgaaacagaaattgaaaaaagtagatgtaaatgcagagcatataatcagcagtgtaaaagaggttggatattgtttaaaagtatataaggaatcatagaaggcgggtttctgaaaatggagcctgctttttatatggcgagatttggttgtaactgtaatagaaaagaaatgacaggaaaactgacagttatttgacagacaactgacagtctgatgacagcttagttttgtatactacttctttatgtaaaaaatgggcttcgttccatgacataaaggagcagtgtatgtgccggaaagagctacaaaagagaaaaacctaacttcatatgcagcgtttggtggtgtcgcaattcaaaacaggattgcggcatctttctttttgtggagaaaactccggttcatacagtcttttgcctgtgagaaggcaaggtcaccgccactccgatttgatttcaaaaaaattcagatcggaggaaaagaaaggtgacatttcataaagcaaaagaagaatataaatggaaacagtggaaggagcaggaggaacggattttgcgaaaatccggtgtcagtgaagaggtaatccaaagacttcgtgaattagactggcaggactttaatgcggagcggagattctgggaacatttttcttctaatcaagaagaattatacaccagggaattggaagaaccatcttcagtggtgcttaatattcaacagttacttgacagtgtggagaatgagcagctattacaggttcttttggagtcggataagaaaacactgcagattttacttctgaagatgtggggattttctgttcgtgagattgcaggccagatgggactagcggaaaagaccatttatacacgaattgagcgattgaagaaaaaaattaaaaaagttttgaagaagtgaagaaaaatggggtatctcatcggctctatatatgaaagggggaattgccccaagttccttgacaaccacataccagcattacaggtacgttcccaaagatagaagcgtgacagcataagcgccaggacggatgggaacaagcactgcaggattgttatggaaaggtctgtccaaagactatggcggatcatttcgtgagaaaactgtcggtgcctgttctcattctgagcgactccttatagctgtgaatggacttttgcaggtctttcgccaggatcatcggagggggataatgatacgaaattcttctcaaaaaagaagaggatggactctaagttgtaatcagcaagactttcaggaaatctgcgagcggtgcaaagcgaagcatccgcctgtgatgttccctaccatagatgtggtgtggcagccggggagtcgaggacaaatacggtgccaaagaaaagaagaaacgataagaaatcaaaaaagagtgtgtcgttgatatcagatacatgcggctgtgggaaagtgccacagccgtattcttgtggtattaacgccatgcggaaagaagtactatgttttataaagttgaatatcaaaaaagagtgcatcaagaagtggagaagatcttccgggtgctatttccagaacaggggctggcagtccgggaagagcagatccgtctctgccatgaaatgctggatactctgctgggagaacagattgccttgtgtgatgcaggggtagggattggaaaaacctatgcttatctggtagcctgcgtattattgcggaagtattccatgctgactgggagaaaaaatccattggaacagcgcccggtggtggtgtccacctccagcattgcattgcagaaagctatattgacggaatatattccctttttgtccagggtgctgctggagcaaggaatcattcagtctccgcttcgggcagtggtgcggaaagggaaggaacactttgtttgtgataacaggctggaacagcgaatcgaagcaatccgccataaacagaagaatgctgcccaaaaagaagcactactgtccttgcgaaaacagtatgacatggatagcgtaaaaaatctgagcgggtttgacagaaggctggtctgtgtgccgaagttctgcccaagagaatgtccgggcaggcagatgtgccgctatcagaggtatctggaagaatccaggaagcaggatatatttattcaaatctgcaatcacaactacttactggcagatgcgtatcacagagcagaaggatacaagcctttactggcggattaccggaccgtgattgtagacgaagcccataagttaccggaagcggcaaagcagatgtttgggaaaaatctatgcatggatgatatccgggaggtagcgtattatctggaacgggaacatcagacggaagaggcaagaatcctgcggaccgtcctgtatgatgcattgcatgttgttggtgcagaacagaagagtggaaaaggaatccgggaaacattccgtcatacaacaaatagtgtgatttctctgtgggaaggaatagaaatgttggaatttcttttagaaaagctggagcgaagtgttccaaagtggatacggaatcggctggaggatgcaaaagaagtgctggagtgtttttgcagcagcgatgagaaatatgtccgctatctgcgattcgatacagagcagcttcctgttttgtgtgcagccagccgggaaatcccagaattacttcggaagatgttatgggatcgggaagaatggatatccgccatcttaaccagcggaacgctaaaggcaggcgcaggttttttgcgcacccggcagatcaccgggctggaaggaagagcaggcgtgcaggaatatgtggcagagtcccccttttcctatgagaggaactgtctgttatacctgccaaagacgctggaacattgcaggagagggagcagggaagaggcagtaatggtggcagaccagatccattccttgatctgttccacttacggacatacgctggtattgtttacctcttatacattgatgggaagtgtgtaccagattttaagagacagcctgccatttcccatggtggaagtatggagatattcccaggaagaaatcttgcggttcaagaccatggagaatggggtgctgtttgcagccggctcctgctgggaaggggtagactttccgggagatatggtatcttcgctgattattgtgaagctgccctttgcagtaccagatccgatcagcgaagcagagaaggagacgtatgactctttggaatcctatatccagtctattattgtgccggatatgcagaagaaactgcgacaaggatttgggagagccatccggacagaaaccgatacctgcgtggtgtctattttagatatacgggcggtaaaaggcggcaagtatcacgaagatgtgatgtgtgcgcttccaccctgccggatagcagaagagttgaaagaggtacaggatttcatccgcagccggaaaggtgtagagtattatttataataggaaaaatctgctttccagccttgttgcttgtgcttattttccaggcgcttttaagggaaaaatttagtacagttttggggcggttttggagagattgttggtattgatgaatagctatttgaacatgaagtgggtataatgtgtatagcgttagaggaaaggacggtgagcaaaatggcacgatatgcagtagaacatatctgggaaggaaaacaggaatatttcttgatccgggatcatcagagctggcagatggtgctgctcccgtccaagtatctgacgcatttgattcgagcaaaccgttccccgaataccgttggccgcagggcaaaatccatccggttctatctggaatatttggatgaaaaagagatggaactgtcccaggtagcggaactggaattccaggaacagtatgaacattatgtgggatttctccactggctgaaagccggaaaccatttgcatgaaaagaaagagaaactgccaagcaataaaacctgcaatgcgtacttaaaagacgtgttcaggtttttctgttttttagagctggaagcagatatggaaaggctaaaggtattatattatgacagctttactacccatgattccatcggtgtaaaacggaagctgcggttccggtcattcaacggctatctgaaagaggaagaacgaaacgtccgtccggcagagcatcaggagattttggaacttctgaagcagtgtaccaactgcagggaccagcttctgatcatgcttctggcagagaccggataccgaatcggtgagatcttaggggtagattataccagagatattgattatgaaagacacaccatccgggtattcttccgggatgacaatgaaaacaaggcaagggcgaagaatgcggcataccgaagatccaaagtcagtgatgccaccttccagtttttactgttctatttgtccaagtaccgggaatttttacagcaccagcagatgctgtttgtaaacatcgaaggagagacaaaaggaaaggcactgcaggtggacgcagtttaccggatgctggagcggatggagaaaaagacaggcatccatacgacgccccatatgctgcggagatacttcggaaatatgaggcgggatgccggatggccgctggaaatgatcagtgaggcgtatggacataagcacatcgacacgaccatcaaatatctgaaccttgtagatgaccagcttatggaagccagtgaccaatattatgcaaaacattctgctctttatgatgtggagaaactcctgtaggaggtgaagaacatgcccgcttatcaattatatgtatatgaagctcaggaaaagcgggaagcactggaacaaaaaatctgtgaacaggtggatgcctgcacagaggtaaatggaactatacgaaacagggtaaagaaattcctgatagaagaggggattactgatatttcagagatggacgcagtcctaagggtcctctacgaagaatatctggaaaggaacgaaaccgttcttgcaccgattacttgcctgcggggatttgatggaatcgtgattcatcggatgaaagaagaactgcagacactggcagggagaagaaactatactacagagtatcgagaacagtggatgtgccttagccattatccggagattgagattgcggaatcctttctagcaagtaaagatggaaaagaactgttgtggaattttaccatggagtgcccaagaaatttgaagatgcagatttttacagtactgaaagaagtaatccatacctaccaaggctgttacagaaaagagaaactgctggcactgcaaaggttctaccaattctgtgcgaagcatcaagtggctgatattgagataatgacactgaccaaagaacagcaatttgggcaggaactctcggaagagtttcgagggaaaaagagaagtactatgtttggcatcctgcggatgagcagaaaaatcctatttttacaggcaccggaaattcattggaatgcgaatgtgtggtttttggaacgtttccatttttccagagaacgaatgaatccaagcaagcccgtggaatgggtatcctttaaagaggtgaccaacctggaaaatcaaaagattttgcaaaaatatctgcggtatctgtttggaatcacagatttatctatcagtaccatccgaatcaagctgctggaacttcgtacattcctggtacacttcaatggagaggaaaagccgatctatgaagtggaggcagagaagattcagagatatctggaatccgttcagagacaggatacccgtgaaaaaacagcaaatggaagaatctttatgattttgcagttttacaatttccttgtagtcaaaggatatctgaagaagattccattccgtcatgtgtattatatgcagaaagaagtgcatgtccataatgaccgcagtgtaccggaaagaatctatacggaaattttatcgaagctggcagaatttccggaacatctgcggttgatgttcctacatttatggtgtaccggaatccggggaagtgaagtatgcaccctgacaggtggcgattatgaagaaaagaatggagattactggctgaaagtgtatcaggtgaaaatgaaaacgtataagcggattcccattccggaagcattgtacgatctggtgcaggtgtacaaaaagaaatatcagatcggaccagaagaatacctgtttaaaagcaaaaaaggtggagcattccagtatgctacattacggtatcaaatgttgaaatactgtgagaaaaatcagattgcagacggggaatatattttcagatcccatgattaccgacataacctggctacgctttattatgataatggtatttccatccaagcggtacgggattacttggggcatgaatatgaagaaatgaccaggcagtatgtggactatatgccgaagaaactagaaaaagccagtgaagtgtatttccaggaagaaacccacagctttgcggcggaactgatgaaaggagagttccatggataaaaaattatatctaatcgatttggactgctatgcaagagcagaggaaaaccagaaaaagaaggtaaaggaatcccattgctttgatttcggactgcttccaacaaaggggcttcaaaaggaattccgttcctttattgagaatcgaagccgacaatgtgcattggcaacgatgatacaggaacgagtgatctatcagagattttgcagaatggtaaaggataagcacatccgggtagagagcctgcaggaactggagtgggaacaatggctgctaaaaatccgaagctggcttctggaacatgggcagaaactgaccatgcagggaatcagcgtatatgggaaagaaaagacagtgccatcgagcctcatcacgtatgtgcggaaggcatatcgatttacagaagccaaagaggaacgggatgagattgagaaagatatctggaaattagagaatctggacattgcctataaaaagaatccgattaaaaatgtacagactttgaattttacagcgattatccaggatgacttacgggaagaaacaaaaaaggcagtttatgagcatttacatcatgaagcgattgcaacgatcatcaaagagttgacagccatccggagactatccagatatttgaaagaaacatatccccaaatccattcggcagaagaaatgaatcgggagttgctggaagaatatctgacgtaccttgcaacagaagcggagggtgtgaataattaccgaatggatttgacgagactcaggggactgctggaaaccattggaaaattatatgggtatccacatttagaaaatttattcttggccagcgacttacccagacaggtgcagccgaaactgaaatcttattcaggcagtgaactgattcgttttaatgcagcgcttgcggaactggatgagcagatggagcgtcttatggtcatccaccagatgttaggaacaaggatatctgatacccttaccctacagacagactgcctgtatcggcaggacggacatcctatgatccagatccggcagatgaaaacaactacctttgtgaagcctatcagtgcagaactggaactgctgattgaaaaagcaatccaatacactagaaaaatgtatggagatacggtttacatttttgcggatgagaaaaatagcaagagacctatgcagtataataccgttcaaaacaaagtgatggatctgatccagaaaaaagatttgcgggacgatcatggagaactattcggatttggaacgcatatgttccgccatgtgtatggtatccgtttaacagaactgcatctggatgactggaccatcgcaaaactactggggcatacatccgtaaagaatgtgaaattttaccggaagatgagcctccagatcatcgcagatgaaacgagagaaatcagagcagagatgagccggatgatccgggcgaatctggcaggatgggggaaagagtatgagcaaatatgacaagatgctggaagtaaaccataagcagagcgtggagaagattcagagggcaaaactgacgatccaagaaatgatcgaagaagaggataaagtgaccgttcccaaactgatgcaaaagaccgggctctccagaggattcttttataagaacccggaagtgcgaaaggcagtagatcgtgccttgcagctacaggctggcatggtagataagagaagaaagattttagatatggcaatggacaaccgtatcctgcagctggagcaacaggtagtgaaactgaaaagagagaacgagacattacggaaagaaaacgaagcaatgcggaaagcattgaataagagagacttgaatctgatcaagaatttttaatgaagaagaaaataatcagtggctggcaggagcgtgaagaacgcgcctgctggtggttgtggggataaaatagaggagaaagcaagactttttcattttgtatcatcaaatatttcatgatacaatagtgctataagttaaatttgagggagggatttctacgatagcacttttggagaaaattcgtggagtaataaataaaagaatacaagagaaaaagaaaaatgaatttacagacttggcacctattgatgatattgaaaatggagctgaatatttaaaggcattacattgggcgataaagaaaaagaaagttaaaaatattgcactggcaggtccatatggtgcgggcaagagtagtatcattgatacatatttgaaaaaacatagaattattagaagtaaatcacttcgtgtttcaatggcaacttttgttgaaaacgaaactgatgagaaggggaatcctaagaaaatttctttgaaacaagatgaaattgaattaggaattttaaagcaattattttataaagtcaattataaaaagattccgcagagcagatatcggaagctacacaaaattaattggaaacgtgtctggggatatttggttttgatatttttaattttgggagtgacggaatttatattttttccagatacttttcaaatgataattgaaaaaatagaagaggcaggtggaaaatttggattaaaagcagtggtttcggatagtattttccttgttttttgtgcgggaatattggcaatcatcgcccgaacatatcgtttggtgctgtttcgctttaaagtaaatgaagtaaaattgccaacagagacagttgtgaaaaattctgaaacggcagcggaaactgtatttaataaaaatatggatgaaattgtatatttctttgaagagacaaagtatagaattgtgttttttgaagatctagatcgtttagaggatccatctatttttatccatcttcgggagttgaatacattattgaataattacgatgggattaaggggcgcatcgtttttgtttatgctattagagatgatatatttacagatacagacagaacaaagttctttgaatttattattccggtaattccaattataaattctacgaattcaggggaaatctttttacaaaaacttgaggaatctgaaaagaaagggattgttcatgaaatctcacaggaatttatattagacgtatctccatatgttgaagatatgcgaatcttacagaatatatataatgagtttgtcatatataaggaaacgattcgtactgaccaggatctgaaattgtcagatgaaacaatgatggcattgattatttttaaaaatttatatccacgagagtttgcggaacttcaaatggagagaggagttgtgaaacaagcttttgaggataagcaaagatatatctctggacaatgtatgcaatggcaaaatgagattgatgagcttacacaggaactagaaaaatatcatgatgactgtttagaacaagttaaagaacttaaaacagctatgcttggtgctatggtgaattggcaaggcattccatatagtattaataaaagccattgggataaatattcagtaagtaaaataatggaggattcgtttgaattattgaaacttgcggaattaaaggatgttgaaattgagtattatacatggagtcgttcccagtcggaaaaatctgtgaataattttcaagaagtttttaaacgatattatgaaagaattaaaaattttcaatttgtccaagaaaaaggtgttagttcaataaaaggtgaaattgaagatttgaagaagaatgtacatgaactttcaggttggtcacttaaaaagctgatagaagaatttggagtccataatattctatctgaaaaagttgctgaaaataaattgcttgtatttatgcttcgaagaggatacattgatgaaaaatacgcaaattatatcaattattttaaggggacaagcattacaaaagaagatatgaattatatactggcagtaaaaaatatggaaaagctgccatataattataatttgacaaaagttggaatggttatacagcgtttacagccttatgaatttgaacaaaaaagtattttcaattttattcttttggaatatttattgtctgaagagaatgatgatgaaaaacgtatgatattaatcgatcaattatctgatagaacagtagaaagttgggagtttatagatgaatttattgagcaaactcaatataaagcgagattgattcaactattagccatgcgttggccagatatgtggaatgatattgtccaggatatatcgataacatatgaaaggaaaattttttatttacagttacttattgataacgtggatacagaacgcttatttgttttaaatgacaataataagatgagtggttttatagaggaaaatccagatatattacagcagctatcatctattcaagatcaaaaggtgatttccttaattgaaacacttgaaattgtttttacgaatgtttctattgcaaatgtttcggaggaaattttgagatatgtttttgaaaatcagtgctatgagttaaatgatacgatgatacgtaggattgtggaatttgaaaatgatacaatgctttctgatttagatactcgaaattatacaacaattatttcactaggatatgaaccattaattaaatacatacaagaaaatttgaaacagtatgtgaaggaaattatattagcacctaataatactaaggaagatgttgaacagattatggatttgttagaaagaatgttggaaaatgctccagaagagaccgaaatctgtttggaattagtgaatcatgaagaattttgcgtagatgatatttctgaatgttgtggaaagttcgattctgattttgataaggacgtgaaaattctttgggatgagttattggataaaggaaaagtaagtctgaaatgggagaatatcaaatgttattgggacagatataagattacgccagaactacttcaatacattgaaacaaatagtgatcaacttacatttttagagaatcagtgtttaaatgaagtgtttgccgaagaacttattacaagtacaattgatgattctgcttttgaaaaactattacctcagttggaattagaatttgatattccaatagagaaggttgagagacagaaagttggaattttgattaagaaaaaatatattccttttgatgttaataaatatggtgaaattaaagatgcctatcctgctttatgtccagattttattttgtataatcaatcggaatatatggaagtaatggaaaagattccaatgggagaaacattattagaaacactattgctttcgcctattctcgacttttctaatgcagaagttctgttggatgcttttggagaaaattatatgactgcaaaaattgctgaaaacttagttgattcaaatgtgacgattaacaaatcgatatttacagcagcctgggaatatgtagatgaaaaagggaaaaagacgttgatgtttaaatgcctttcgattttagaagcggctgattttgaaaattgtttttcagaactttcacaatggtattcaggattttgcgatagaagtaaaaaacatagcgttgaattacctaataacgaagaaagccaaaggcttgctaaacgattacaagaagtatcgtacattacaagttacaaattacaagaaaaagaagtctatgattctgttacggaaacaaaaaagaaaaagagtacttttgtgtgttggataaaagcaatcaaaggataaaagaaaatttttcatagtatttaagggagatcaaggtagggtataagagccctgcctttttctgaagagaagtgtacacagtacacaaatgtacataccgttaaagcccctattttcaaggcataatgggataggggtacagtttaccgatgagcctacagggaatctggattcagtaaacagcagcgaagtcattggaatgctgaaatcttgtgcaaagcaatttcagcagactgtgcttgtggtgacacatcaggaagaagtggccaagatggcagaccggatcatccggattgaagacggaaagtatcaggtggaggaataaaggatgaagaaaaaggcatctgtcctgaatcagaatcgtcaggtgcttgggatgctggcacgcgaattgggaaaatggaaccggggaagaaacaaaattcttatgggtgcagttgtactttgtattgtgacattgacaatggtatttggaatttccattggaaagacaaaagcagagtatataaaagctgtaagagcagcaggaagtactgcctcggtttggattgaacaggcagaaaatgagatatatcagaaaaccacaggactttcctatgtgaaggaaagtggtcgcagggtatctgtgggagaggcggcagtttccgaaaaacatatatgtaatctggagatattggacacatctgcatggaacaaactggtaagtcccgcatatacggagatccgaggacattatccggagaaaagacaggagcttatgctttctgtaaaaagtctgaaacagttggggatgaaagagccgaagcagggaatgaggatttcattcacagtgagggtcggattgtttgagacagtgcaggagacttttttgttaagtggatggtatacggatcatagagattcacaggacatgataggatatgtgtctcaagaaaaaggaaaagagtggggatatgatcttcaggagatatccgatattttgcttatacagacagatggaatgtcatggcagaaaacagaagaacagttgtatcaggatctgggaagcaaggaactcaagatcacagcagacaacacatttgcatacgaagcggtcaatcgcctgacaggaggctatgagatggctgcatgtggcgctctggcaattctttttgggatgtttttactgatctataatgtgatgaaaatctcgatgcacagggatgtccaccagatgggacttctgtatacgatcgggacaacgaaacggcagataacaagaatttatgttcggcagattctggcagtcctgctgccgggagttttgcttggcagtcttttttcgggaatgattttgtatattctgattccgaaaattctgggaagcaggtatttaaacggatatgggaaatccggagagtttcaggtgttttcccctgcaattctgttggccgcggctggatttgcagtggttctgacacttggaacggcgtggcttgtgattcgtcatgtcgttcacacatcctgtgtggaaagtaccacagttatttgtggaatccgccaatattccaaaaggccgctgaatatgagaaagcggacgaaaacaggggaaatcggctatatggcatggcagaatgtaaggagatacaaaggaagatttctgcttacggtgctctcattgtttctcggtgtggaaatgctgctcatatctgtggtcattacggcgggaagtgactatacgcatgtgatcgaacggcgccctgattttctgatcgccggcatgttcagtgactggggaatggagcagggatacggaaaagaatatcaatacagggacgcagggtgtgatccgatggagacagaagggaataatttttacctgctgtatgggaatcaatatgaggagttttcgccggtgtcttccgaagtgcgggacaggctgctggagctggatggtgtgaagcgggaggagtcttatgttatggaaggcgcctaccttacaacgatcatttccaggaaaggaatccatcctctggaggaggatgagcagatgtcaaaggaaaaggaagacgatatgctggaaggatttacagaggatacggttcaggtcctgaccgatgaagaggtggaaaaacttgcacattatgtgaaagagaaaaatcttccggtagatatggaaagtatgaaaaaaggaaacggagtccttgttcttcatgaccatcggctgaccccgaaacaggaagaagaagccagagaaagtgtgggagaacccctgtattttttgacgatgttgtcagagcaggactggaggcagtggaatcagctgagtccaaaagagcgggatgagcagacagaagcaggaaatatgcggagaaaacagtcggcaacattttgtctaagtggatatctggacaaccgggcagaaggctttccagacattcgtcagacgtggcacggaaaagaaggaagtatttattttctgatcagtgagacaggatttgagaagattccgacggaaaaaaagacgctttatatggagctgaatgtagaacctgaaaaagaagcaacaatccgaaaagaaattcaaactattttggaagaagaaaacaaaagccgggaacaagtggatttaaaaaaagaggagagtggagcagccggaattttctgtatcagtaagtcagaattattggaagatgcgaaagaatatatccggggaaatcggatgatttttggaagtatcagtattgtacttttgatggcaggtgtgacaaattatttaaatattgtggtgactggtattttttccaggagaaaagaattatggatcatggaacaagtggggatgacgaagaagcagaagcgcatgcttcttatgatggaaggcggatattatttctgtacggtggcagttctgcttgtgacagttggaagcatcatgttacagtgggtgaaaatatacatggaagaaagactttcctattttgtatttcaatatccgtttatctggctggcagtcagtctgggctgtctggcaggaatcactcttgcagttccgacaggattgtatgtatttgaaaagagaaaagaggagaatttatatgtttgagagaatagattacaaagtgctcagaatcgacggagagtatgcgtatctgcaaaaactggaagatgaaaatgcagaagaaaagtgtgtggcaatggcactgctccctcaggagatcatggagggaagtcaggttgcttatgagatgatggaatatcgtgtgataaagtaacaaatttacaagtttgttttgacagaatgtgtatctggtattatgataaacatcagaaagaccagaaaggagtgcgtatcagccagtctgggggctgcgcaaaaaaagcaatgaaagtgataaaaaacaaaaccatttatacgggaaaaggtgtcattgaaaacggatttgtaagatatgaaaagacgatcgccgaggtaggctccatgcagaattttgtatcaagagaagaggatgagattgtagatgtggaaggcgggtatttgattcctggattcattgatgtacacagccatggaggatatggtctggacagtatggatgcatcggcagacgagattgactggatggtcagacagatggctgcaaaagaaggaatcacgtcatatttctgcacgacgatgacacagacttcggagaacattgagagcgctatgaagaatatcaaagaggcagcagagaagaatccgatcattcaggggattcatttggaaggtcctttcatctctgtgaattataaaggcgcacaggatgcatcttatattcagaaaccggatgcagcagttttaaaacactggaatgaactgagtggaaatcggattaaaatcgtgacttatgctccggaagaagcagatacagaatttgaagactggtgtcttgcaaatgggatcgtaccaagtgcaggacattccaatgcaacttacgatcagttgtgctgctgcagagcatgtcatgtgacccatctttacaatgcccagagaggtctcaatcacagagaaccgggtgtgacaggttatggacttttgacagaaggcgtgaaagcagagatgatctgtgacggcatccatatcaaaccaaagatggtatatatggcatataaagtaaagggcagcgatggaattgaacttgtgacagattctatgcgggcaaaaggcatgccggaaggaaaaagtgagttgggcggtcagacggtctatgtgaaagatggcacagcgagactggaagatggtacgatcgcaggaagtgttcttacttatatagatgcatttcgaaatatcatgaagtttacaggagcttccttacaagaggcagtgcagatgagttccggaaatcaggcggaggaatttggactcactcaaaaaggagctattgcagttggaaaagatgcagattttgttattttaaaagaatcttcagagaacgagtatcagttgatgaagacgatcagtatgggtgagcctgtagaggcatagagagaaaaacaaaggaggaatcgtacgtttgggacgattcctcctttgggtttatagttgaaatacctgcgttgcaatattgaagtagattaaaatggaacaggtgtctaccagagttgtgatcaatggggatgccatgatcgcaggatccatatgcagttttttggcaatcaatggtaaaacacatccgatcagttttgaaattacaatcgtagcaaccagagacaatccaatgaccagagcaagtccggcatttttgtacatgatcagaatacggattccgttcgcaagtgcaagtgcaactccaacgatcagagaaacacgaaattctttaaacatgacccgaaacaggtcagaaaattgaatttctcccaatgcaattccgcggatgatcaatgtggaactttgagaaccacagtttccgccggtatccatcagcatggggatgaaggatacaagaagtgggatcgcagcgaaagcgttctcatatctggtaatgatggttcctgtgatggtagcagagaacatgaggatcaaaagccatgcaattctatgctttgcatgtgccaatacagatgtttcaaaatagcttttttcacttggactcatggcagccatcttggtaatatcctcggttgcctcatctaccataacgtccatggcatcatcgaatgtgacgattccgaccagccgttcgtcctgatccagaacggggagggcgagaaaattgtattttgtaaacaactgtgccacttcttctttgtctgtatgtgttgagacagaaattatctctgtctgcatcagatcccggatcaaaacatcgtcggcagttgtcatcagatctttggcactgacgatgccaagcagcctgcgctgatctgttacataacaggtgtagatcgtttccttgtgaatcccggtctctttgatatgtgccatagcctgggcaaccgtcattgtctcccggatatcgacatactccgttgtcataagactccccgcactgtcatccggataattgagaagctgattgatcaaagtccggtcagcctgatctacggtatttaaaatccgattgacaagattggcaggaagttcttccagaagatccaccgtatcgtccatataaaggtcatcgagcagctcttttaactccttttcggaaaacatctctaccagatatgtctgcatggaatgattcatattggcaaatacttccgcagctttatcttttggaatgagacgaaatgcaagtgcaagttctttatcgtccagatcggaaagaagtgaggctatatccacttcgttcatcacatccagaatgcttctgacagccttgaactggcgctgtgcaaggagttttacaaaaatttctttgttcatcgttcaacacgctcctttttctatttaattttctgaaaaatcccgaaggatgactggctccagcgtccataacctcaccacctttttgtatgtattaaaaatatctgcaaaagaaaaagcctcattgtcgtgacaatgacagcatatgcagcaaatttccgtacttattctatctcaaaaaaagtaaaagtgtcaagaaaatttgtgtaagtaaaatgtaaacaaattgaaaacagcagcagggcaaacggcaaggaaagcgggttatcgatttacagttgcaccttgttatgctaaaatgaagagcaggaattgaaaaaggagcagaaaaatggatgcatatacaagttttgcggcagtgtatgatacgtttatggacaacattccgtatgaagaatggaaactctatttggaaagtctgttaaaagagtatggtgtgcaggagggactggtgctggatcttgggtgcgggaccggaaccatgacagaactttttgcagcagacggatatgatatgatcggagtggataattcggaggagatgctggaaattgcgagagaaaagcagatggagtccggtcatgagattttatatttactgcaggatatgcgggagtttgaattgtacggaaccgtccgtgcagtatacagtatctgtgattcgctgaattatattacagatccggaggaattggtgcaggtatttcgttgggtcaataattatctggatccgggcggaatgtttatttttgattttaatacagaatataaatatcgggaagtgcttggagatcagacgatcgcagaggccagagaggactgcagctttatctgggacaattattattacgaagaggaaaagatcaacgaatacgaactaaatctgtttctcaaagaagaaggggacgacagaggagagggtgaactttaccggagatttcgggagacacactttcagagagcttatacattggaagaaatccggcagatcgtggaagcctccggtcttgaatttgtgactgcatatgaggcgtttacaaaggatgccccttcttgtgaaagtgagcggatttacgtgatcgcccgtgagcagggaaaagttcctgctgaattagaaaaatagaacaacaataatacgaggagaaatgacatgaaagattatattgtaagagcaaccgctgcgaatgcacagattcgtgcgtttgcagcatcaacgacagaactggtggaagaggcaagagcaagacataatacaagtccggttgcaacagcagcgctgggacgacttcttaccgcaggagcaatgatggggagcatgatgaagaacccgaccgatgtgctgacacttcaggtacagtgtggaggccctattggaggaatgacagtgacagcggacagccagggggaagtcaaaggatatgtacacaatccagatgtgatgctgccgccgaaaaacggaaaactggatgtgggcggagcgcttggcccgggatttttaaatgtgatcaaagatatgggactgaaagaaccgtattctggacagacaattttacagaccggagagattgcagaagatctgacctattattttgcaacttcagagcaggttccatcctctgttggcctgggagtattgatggaaaaagataatacagtacgatgtgcaggcgggtttattgtgcaggtgatgccgtttattgaagaagaggtactgagtaaactggaagaaaacattcagaatattcagtccgtgacagcgatgcttgacaacggtcatacaccggaggagatgctgaatcatgttctggaagggctggatgtggagattacagatacacttccgacaaaatttgactgtaactgctccaaagaacggattgaaaaggcaattatcagtgtcgggaaaaaggacattcaggagatgatcgacgatggaaaagacatcgaggtgaagtgtcatttctgtaataccgcttatacattttcggtagaagagttaaaaggacttttgaaaaaaagccgataaaaagtccgaatggagaaagtgaggcagaaaaatgaaacagggatttatcaaagtggcagcagctacaccggatatccgggtagcggatgtgccgtacaatacaacacagatatgcagtgccattgaagaagcacaaagacatcaggcgaagatcgtagtatttccggaattgtgtatcacaggatatacatgtggagatctgtttacgcaggatgtgcttttgcaggcggcaaagcaggcattgcttgagattgcagcgtttacaaaagaaagagatatgcttgtatttgtgggggtaccgctttctgtagacggcgaactttacaacgtggcagcagcactgagcagaggcgagattctgggacttacaacaaagacatttcttcccaattacggagagttctatgagatgcgtcagtttgcatcggggccggatgcaccgggggaaatcctgtttcacgggaaaaaagttcctttcggaccaggacttttgttccaggaagcttccatggaggaactgatcgtagcagcagaaatctgtgaggatgtctggtctccgattccaccgagcattcatgcagctatggaaggtgcgacggtgatcgtcaactgttctgcaagtgatgagaccattggaaaagacagttacaggagagaacttatcaaaggacagtctgccagactgatcgcaggatatatctatgcaaacgcaggagagggtgagtccacaacggatctggtgtttggcggacacaatctgattgctgaaaacggcagtattctggcagagtcaaaacgttttgaaaatgaaatcatttatacagagctggatctcaagaggattgcgggtgaacgacgcaagaatacaacttttcagatgaaaaaagaaaaagcgctgccaaggatcttattttcgctggatgtctgtaagacagaactgacacggaccttcccaaggaatccgttcgtgcctcaggatgaaaaagagcgggcatcacgctgtgaagagattttgaccatccaggcaatgggactcaaaaaacgtctcattcatacacatgccaatacagcggttgttggaatttccggtggtctggattctacgctggcactgcttgtgaccgcgaaagcgtttgatatgatcggaaaagacaaaaagcagattcttgcgattacgatgccttgtttcggaacaaccgacagaacatatcagaatgcatgcaagatggcagaacagctcggagcaacactgcgggaggtacagcttgcagagtccgtgagtcttcactttcgggatatcggacatgatcctgaagatcacagtgtcacctatgagaatgcacaggcgagagagcgtacccaggttttgatggatattgcaaatgcaacgaatggaatggtgatcggaaccggagatctctccgagctggcgcttggctgggcaacttataatggcgatcatatgtccatgtatggtgtcaatgcatcagtcccaaaaacattggtgcgtcatcttgtcaaatatgcagcagatgtgacacccgatcagaaattacaggaagttctttacgatgtattggatacaccggtcagtccggaactgcttccgccgaaagacggagatattgcacagaggacggaagatctggtaggaccgtatgaactgcatgatttttatctatatttcatgctccggtttggatatgagccgggcaagatttaccgcctggcgttggaaacgtttgcgggggaatacgagaaggagactatattaaaatggctgaagacattttgcagacggtttttcaaccagcagtttaaacgatcctgtctgccggacggaccgaagatcggaacggtggcactttcaccaagaggggattggagaatgccaagtgatgcatgtgctgaggtatggatgcgggatctggaaaagatttcctgagtgttgaaaaagagaggtgtagagaaagatgaagctgatcagaacagaagatgcggttggaagtgtgctttgccatgatattacccagattattccgggggtggtgaaggatgcggtatttcggaaaggacacgtagtaacagaagaagacataccgatccttctctctgtaggaaaggaacacctgtatgtctgggaaaagcaggaagggatgctccacgaagacgaggcagccgaaatccttcgcagggtgtgtcagagtgaaaatatgaatgcatccgatcccaaagagggaaagattgaactgacggcgcagtgtgatggagttctgaaagtcgacaaagaaaagttatgtgggatcaatgccctggggcagatgtgtatttcttctcgtcacgggaattttccggtgaaaaagggggataagattgcagggatgcgagtgattcctctggtgatcgaagcagaaaaaatggaacaggtcaaaacactggcaggggaagagccgatcttctctttgcttccgtttcaaaaacgaaaagcagcaatcgtgacaacgggaagtgaagtctattacggaaggattcaggatcaatttacgcctgtagtcagagcaaagctggaagaatatggtgtggatgtgattggaaatacgatctgcaatgacgaaccggatatggtaacaaaagcagtcaacagctggatcgaaaaaggtgcgcagatggtcgtatgtaccggcggaatgagtgtggatccggatgataagactcctcttgccattcgcaatgcgtctgatgaggtggttacatatggtgcaccggtactgcctggtgcgatgtttatgctggcgtatcagggagaaataccgatcatgggactgccgggatgtgttatgtatgcaaggcgcacgatctttgatctggtactgccaagacttgtggtcggtgaacggatgcatgcacaggatttttatcggcttggagaaggcgggctttgtctgtcctgtgaggtgtgtacgttcccgaactgcggatttgggaaaggctgatggaacacaatgaagaaggagcgtgaagagatgtatgaattttatcattctcttgcagaaaagctgcagagcagttcctgtgttgtgatgactgtattagaaggagaacatgcaggggaaaaattacttgtaacagagctgatggagcagtatgaagggcggtccgtgttttgtgaacgcgtaggtttacagcccaagctggtaatctgcggaggcgggcacgtatcaattccgatgatccgtatgggaaaaatgctgggatttcaggtgagtgttctggaggatcgccccaaatttgcagatcatgcgcgctcggcaggggcagacgaagtgatctgtgattcatttgaacatggactttcctgcatagcgggcggagaagatacatattttatcattgtgaccaggggacacagatacgatgagatatgtctgggaatgatactgcaaaaaccgaatgcctatattgggatgatgggaagcagacgcagagtggcgattgtcaaagaacatctttgtgagcagggacatgaccgtgcagcactggagcaggtatttacaccaattggtctgaagatcggggcagagactccggaggagattgccgtatccgtaatggcagagatcatacaagtgaagcatgaaaaagcagcaggggcaggatattcaaaagaattgctggaagcgctgtgtacagagaaagagccaaaacagaaaaaagtactcgcaacgatcatctccagaaaaggttctgcaccgagaagtgtgggaacgaaaatgctgatatgggaagacgggactttgttggatacgattggcggcggatgtgcagaaagtgacgtcattgcaaaggcgctgcagatgatgagacaagatcgggagacatttcaaatttgtacggtggatatgacaagagaagccgcagaagaggaaggcatggtgtgcggaggccggattgaagtgatgttggaacgcgtgtagaatcgcttttctgtacagagcagttgacatctaaaaacaggaatgttaatataaaattaaagaaagaaaagcaataattgtgcgaattgcacaaagaaaatcgtgcttatataggttcataattggttgaacgtttctaccagctgccgtaaacagttgactataagcagagtgggacaaaagtcccggtctgtagtcggggcagagaagtaggaggtcagccaatgaatgaatctgtttttatattaaaaggaaatattgtatacagtcaggataaagaaaaattgcgtgttttggaagatcactatttgatcagtgagaatggtctggtcaagggagtgtctgcaaatcttccggcggagtatgaagcgctgccggtaaaagattatggggaatgtctgatcattccgggattgatcgatctgcatgtacatgcgcctcagtatgcatttcgtggaatgggaatggacatggagcttttggaatggctggagaccaataccttcccggaggaggcaaaatatcagaacttagaatatgcaggaaatgcatatcagatctttacacagaatctgaaaaaaagtgcgactacaagagcctgtatttttggaacaatccacagggatgcgacattgctattgatggatcagctggaacaaagcggattggtgacctatgtggggaaggtcaacatggatcgcaattgtccggattatcttcgggaagaatccgcagaagaatctggtcttgagacggtagaatggatcaaagatgtactgcataggaaatatcagaacacgatgccgatcttaacgccaagatttacacccagctgcagtgatgagctgatggagaatctaaaaaagatccagttgtattatcagattccggtgcagtctcatttgtctgagaatccaggggagattgcctgggtgaaagaactttgtccatggtcagaattttacggggatgcgtatgacagatttgggctgtttggcgcagactgccggacggtcatggcacattgtgtttattccggagcagaagagcggcagcgtatgaaagaaaacggagtatttatcgcccattgtccggaatcgaatctcaatctgtcttccggggtggctccggtgagaacctttttggaagaaggcctgcgggtagggctgggaagcgatgtggcaggcggctccacagaaaatctgtttcaggcgatggcgttggcagtgcaggcatccaagatgcgctggagaatgcaggatgacagtttacgaccacttacgctggaagaagtattttatatgggaaccagaggaggcggtgaattttttggaaatgtgggaagttttgaacctggctttgaactggatgcagttgttctggatgacaccaggctgcttcatccgcagacgctggatgtgagggcgcgtctggagagaatgatttatctggcagatgagagagaagttcgtgcaaagtatgtacggggaaaagaaatctgtctgaaataaaacttgggaatgtcaaaataaattgcggaggtgacgcataatggaggaaaaggaacatgtagtcggcaaaagtatgaaacgagtagatgcgctggaaaaggtaaccggccgtgccaggtatacggatgatctatgcgataaaagtgcgtatattgcaaggatacttcatgcagagatcgcacacggtattgtaaagtcggtggataccagtgaggcagagaaaattccgggagttgtaaagatcgtaacctgttttgatgtgccgaaatattattttccgacagcagggcatccgtggtctacggatcctgcacatcaggatgtgaaagaccggctgcttctgacggatcatgtgaggttttatggggatgatgttgctgcggttgttgcagagaatgaagtggcagcatctcaggcgctgcggcggatcaaagtggaatatgaaccgctgccgtttgtattggatgtacaaaaggcaatggaagaagatgcaccacagcttcacgaaaactatccggggaatgtattgaagcacacgtccattcacaaaggagattttgaaaaggcaaaggaagagccggggctgatccgggtagaaggctggtatcagacaccgacagtacagcactgtcacatagaaaactttatttgctattcctatatggagcagggaagatacgtggttgtctcttctactcagattcctcatatctgccggagaatcgtggggcaggcactgggggttccatggggaaaagtacgtgtgatcaagccatacataggaggcggatttggaaataagcaggatattttatatgaaccgctgtgtgcatatctgtcacaggcagtaggaggtcgtctggtgaaactggatgtaccgagagaagagacgtttgtatgcaaccgtgtgcgtcatgcgattcggacacatctgatctcttatgtacgtccggatgggaaaatcgtggcaagaaaagcagaatgtttttcagaccagggtgcatatgcatcgcatggacatagtatcggcgcaaaggcacttggcgcatttccacagttgtatccatgtgagaattttgaaggtgatgtgtatacggtctttacgaataaacctgtgtcaggagcgatgcgcggatatggaatcccacaggcgatgtttgcgatagaaagtcatacagatgatatcgcagtccgacttggaataccgccgtatgaataccgttggaactatctgatgccgaaaggatatacagatggattttcgaaaaacgtgaattattacgatactttccgggaatgtatggaaaaaggaagtgcgggcatagactatgagaagaagtacaaagagtatgcacaccagacaggagatgtccggaaaggaatcggggtggcagcattttggtacaatacaggtgtatggccgatttctctggagacttcttcctgcagaatggtcatgaatcaggacggttctatccaggtacaggtaggcgaaacggaaattggacagggagcagacacagcatttgcacagatggcagcagaaactctcgggatcccatttgatatggtacatgtgatgaccatgcaggatacggatatcacaccgtttggtctgggagcttatgcatccagacagacatatatggcgggattttcaatccgtcagacagcagagctgttaaagagtcatattttggatacggcagtggagctgacacggcagatgaaagagaatctggatattgcagacggaaatattgttcgaacaaccgacggcagtgtattgatgtctcttggagaactggcaacagaaaaactttacagtctgaccaactgcggacatcttacagcagagagcacctatcagatcaagaacaatgcatattctttcggatgtacatttgcagaagtggaagtagatattccggcatgccgggccacactgacaaatgtggtcaatgtacatgactgcggcagactgatcaatccggcactggcagaagcccaggtgcatgggggaatgagcatgggaatcggattcgggctttcagaagaactgaaatttgatgaaaagacgggaaggcctttgaataataatttgttggattataagatggctacatttgaagatcatccggatctgcggggagaatttgtggaaaattatgaaccgaccagtgcttatggaacgaaagcactcggtgagccgcctgtatgttcagttgcaccggcaatccgaaatgcagtgttaaatgcaacggggtctgcactcaatgagattccgctgactccgcacaggttgtttgaaaaattccgggaagacggattgattgaatgaggaaaggtcgtgaacgaatatgtatgatatcaaagcgctttatgaagcagaaaatgtacaggatgccatccgtcttctgacagaacacccgcaggcacagatccttgcaggcggaagtgatgtgctggttcagatccgggaaggaaaacgtgcaggtgcagagcttgtcagtatttacgggttggatgaattgagaggagttacaatggaggaagatggaacgatgaggatcgggtctcttaccagcttctctcatattacaaaaaacgaatggattcagaagtatatccgggtgctgggagaagctgtggatatggtaggtggtcctcagatccgtaacatcgggaccattggaggcaatacttgtaatggtgtgacttccgcagattcggcgtccaccctgtttgcctgggatgccgttgtagagctgacaggaccagacggagtacgaagacttccgattcaggagttttatatcaaagcaggaaaagtagatttgagaccgggagaaatccagacgggaattctgatcccgaaaaaatcttatgagggatatcagggacactatatcaaatatgcaatgcgtaatgcgatggacattgcaacactgggatgttctgccaatgtgaagctttcaaaagacggtaaggtaatcgaggatatccggattgcgtatggtgtggcaggaccggttcctatgcgggctgttcatgcagaggaaagtggaagaggaaagtgtgtgtccgcacagtcgctggaagaaattgcagaacaggtgcttctggatatccatccaagagacagttggagagccagcaaagcgtttcgggagcatattgcaaaagtgttatgccaacgcacagtaaaggaagcaattgtcagggcaggaggtgtcatccatgagtgaaaagcagtataaactggtaaaatgtaccatcaatgggaaatacacagagacaatggtggatgtcagggcgtctttgacagatatgctcagaaatgactatcggctgaccagtgtcaaaaagggatgtgaggttggagagtgtggagcctgtaatgtgatcattgacggagagtgttttaattcctgtatttatcttgccgtgtgggcagatgggaaaaatatccgaactctggaaagtcttttagggccaaatggagagttgtcagatatccagcaggcatttatcgatgaggctgcagtacagtgtggattttgtacaccgggagtgatcatgagtgcagtggagattttggagtccggcaaagaatatacaagagaagagctgagaaagcttttatccggacatctgtgccgctgcacaggatatgaaaatatcttgaatgcggtacaaaaaaccatgtataaacggttgggaaaaactgaaaattaagattttcgtgctgttgcataagttcttttttaaaatctggacacaatatctttaaaaagaaaggacagattatgagaaagaatatggctggattgattctggtattgtttgcagcagcactttttatgaccggatgtgaaaaaaaggctcaggaaaaagaagaagccaaagaggcatctgcacgtcagcttgtgattcggaagcagacacagacagaaattgcagaaaagaaaattgaagaaaaaagaaacaaactgccggatcaggcgcagattgatatggaagtgatcctgcagaaaccggaactgccgacagggtgtgaaagtgtcgcattgaccatggttctccggcagaagggatattccatagagaagacgacaatcgcagaaaattatctgatctataatcaggaaaactatgcggccggatatgtaggagacccatcgacttatggaggggttggaatttatcccccgggccttgtaaataccgcaaatcgttttttaaaacagcactatcagcagcagacggcatatgatgtaagtaagctgaagctggaggagttgtttccttatgtagcggctggaaatcccgttcttttgtggctgacatcggatatggaagaaccttatttttccaatcaaagcgtggaatatggaggtgacccatatcggtggtattggaatgagcactgtgttgtgctggggggatatgatctggaacaacaaagcgtgacattgtttgacccgttgcatggaaaaatagaatatcctgtggaaaaagtagaaaaaatttataatctgacgggaaaatatgcgatgacaatttattaaaaagcatctgtgaagaatagatatgcgttcttcacagatgcttttttatggtctggtatgtgatgcaatatgatgtttgatcgcttcaaaactttctttgctgatgatgtgttccatccggcaggcatcttcggcagcaatggcttcatctactccaagttgtgtcagccatgcagtcagaagcttgtgacgttcgtaaatcatatcagcaatagcttttcctgattcggtgaggtaaataaacccttcttttgtaactgtgatatgttctttttcacgaagattcttcatggcaacactgacactggattttttgaatcccagttcttctgcgatatcaacagaccgtacaaccgggcgtttctgactcaggatcaggatcgtctccaggtaattttctgcagattcgtttgtcttcaatgtatgcacctcgtttctcgttaaattgtatttagtatatcatattttgactgtgacagcaaatgattgttcttctgaaaagaaatagaaaaaacaaattattgacagcttacaacggttagaatatactaactaaaaagaggatcaaaacaggagtttagaggaaaaggggagtacacagtgaatgatttgagactgcaaaaagaaatcatcctgaaaaaattgaaagaacagggatgccggatcacaaaacagagaatggagctgatccatattattttggaaaatgaatgttccaactgtaaagaaatttattataaagcagccaaaacagataaaaaaatcggaattgccacagtttacagaatggtaaatatgctggaagaaatcggcgcgatcagcagaagaaatatgtataaggtagagtgttcagatttatgccaggaagaagatgcgtggatagtggtactggatgatgagagtgtctgtcgaatttcctctcagaaatggcggcaggtgatagaggctggattgcaggaatgtggatatatgcgtaacagaaaagtgatgtccatttcacagatgacagatacagaaaaattggaaaaaagaattgacaaatcgaaaaaataagaataaactaaaacatgttagtgataactaataaaaaatagttttaaaatacttaaattagccaagtggagaggagagattatgatgcccttgacgatggcagcggcaaatgaaatcaattatataaaaaaagtaggaggaaacagtgaggtgaaacgccatttagaaacgctgggatttgtaactggaggaaaagtgcgtgtgatttcccgactaaatggaaatctgattgtgagtattaaagattcccgagttgcaatcagtaaagaaatggcaaataagatcatggtctaaaggaggggatgaaggatgaaaacattgcgaaatattgcagtaggtgacactgcaacagtgaaaaggcttcacggagaaggtgccttaaagcgccgtattatggatatggggatcacaaaaggcagtcagatctatgtgcgtaaggtcgcaccgtttggtgacccggtagaaattacaattcgtggatatgaactgtctttgagaaaagacgatgcggattgcattgaaatggagtagagaaaggaaagggagagagtaatggcgatcaaaattgctttggcaggaaatccaaactgcggaaagacgacaatgtttaatgccctgacaggtgccagtcagtatgttggaaactggccgggagttacggtggaaaagaaagagggaaagtacagagataacaaagaggtcattgtaacggatcttccggggatttattcattgtctccatatacactggaggaagtggtgagtcgtgattatctgcgaaaagaaaagccagatgcgatcatcaatttggtggatgctacaaacatcgaacgaaatctgtatctgacaacacagcttttagagcttggaatcccggttgtgatcgcgctgaatatgtcagatctgctggaaaaaaatcagatcagaattgataccggaatgttggaacaacagctgggatgcaaagtgatcaagacatctgcactaaaaggaactgggattcaggaagtggtaaaagaagcggtggcggccgcaaaaagaagagatacggattttggtgcgattgcgttttctgaagatacagaaatggcaatttctgagatgaaacatctgctgccgtcatccgttccacaggagcagagaagatggcatgcaatcaaactcctggaacgggatgggaaggttctggaacagctggagctgaacgcatctgtgcagaataaagcagaagagattgctgcaagattggaagaaaaactggatgatgataccgagtcgatcattaccaatgaacggtatgaggcaatcacttgtattgtggataaatgtgtaaaaaaaccaaaggaaaaactttccacatcggataagatcgatcagatcgtgacaaacagaatattgggtcttcccatttttctgggtgtcatgtatgttgtgtatgcaatcgcagtcatgacgatcgggacatacgtgacggactggacgaatgatgtgctggtagtggcgattcaggatgcagtggcatccgggctgcaggcaatcggtacggcgtcattcctggaagatctgatcgtaaatggaatcatcggagggttgggagcagttcttgggttccttccgcagatggcgattttgtttgtattactttcggttctggaagattgtggatacatggttagagtagcttttgtcatggatcgtattttccgcaaattcggactttccggaaagagttttatcccgctgttgatttcatccggatgcggcattccgggaattatggcatccaagaccattgaaaatgacaatgacagacgtttgaccattatgacttctacgtttgtgccttgtggcgcaaaactcccggtcattgcattgatggctggcgtgatcggttccgaagcaaccggatttccagcaggttccctgacatttatcatgtatgtgatcggtgttgcagcagttttgatttctgcgatcattttgaaaaagacaaaaccattccatggagatgcagctccgtttgtcatggagctgccagcatatcatctgccgcaggccaggactgtgctgcttcatacatgggaaaggctcaaagggtttatcagaaaagccggaacgatacttttgctggcatgtatcgtgatgtggttccttggaggatatggatttacaaatggaagctttggtgcggttgaagactccgcagacagcattctggcagtgatcggaagtgcgatcgcagtggtgtttgcaccgcttggatttggccagtggcagccggtagcagcatctttatccggattttctgcaaaagaagcaatcgtaacaacaatgggagtgcttgcaaatgtagccggggacacagaagatccggcagttgtggcaaatggggtagcaatgtggtttccatcggctgccgcaggattcagctttttgctgtttaatcttctggactctccttgtctggcagcaattgctgcgatggcaaaagagctgaatgacagaaagtggttctggtttgcaatcttgtttcagaatgtgtttgcctatgcagtaacatttatggtatatcagatcagtggggtggccacaggtgctcttacatttggggcatccacagtagcggcaatgcttcttctggcaggagttttatatctgttattccgaaaagatccatataagggaaaagcagtgagtgcgagacgatccgtggcaggtgtctgaaaggagaggatatgggtggaatagaagcggcagtgtctatgggatacgtggtattgtatttgattcttctgtatttgtctggtattggaatcttccgtttgatacaatatataaaaaagaaaaagagaaggtgataacatgaatgcagcaacagcgatcatattgatcatattgattgtaattgtttcgttttcagtccgtgcgacgatccgtgatcggaaaaagggtggctgtgcaggatgctccggctgtggaggaagctgcagtggatgccatggtgaagtggaacagataaagaaatcggagtaaagaaaagaagaatgaagtggttttatcgtcagcaaatgtgggaattacaggaatcatacaacttacgacatcggtacggtttcatagtctttctacgctgacgatcaggctgactaatatgaaaaatttactggttattgagaaaaaacagacaataacgctcttgatttttcaaaacaattcctataaaataaaacgggagttagttaaaactaaccaataggaagcgtttagaaaatacaggaggtgcgtatgagtattgttatcatcggaggacatgaccggatggtgtgtcaatataaaaaagtgtgtcagaaatatcagtgcaaagcaaaagtgtttacacagatgtccgggaatctggcgaaaaagatcggaacgccggatttggtcgttttatttaccaatacagtttctcacaaaatggtacgatgtgccgtagaagaagcagggcgatgtaatgcagaagtgatccggtgtcatacgagcagtaaaaatgcactggaggatattctggaaactgcctgttcagcaggagaaagtgtcaaataaaaaagaacttttaaaagtgcaaaaaaaataaaaaagataaaaaattgcacaaaaaagtagaaaatagagagtatacgatgcgaaatatgtgtggtatactctcttttgatatgaaaaaatgagggatgaggaaagtagcatgaatatcagaaaaaattacaatcatacattgaatgcctgctatctgggctatattacacaggcaatcgtcaataattttgcacctcttttatttttgacatttcaaaatacatatcagatttcactggataagatcgcacttttggtatcgtttaattttggagtgcagttgatcgtggatttgttggccgcaaaatatgtggacaagatcggataccgaaacagtgtggtggcagcacacattttaggtgcggtgggcctggtgggtctggcagtgtttccgtctgtttttccggatgcgtatgcaggactgcttatggcagtattttgttatgcaatcggaggaggattgatcgaggtgctgatcagccctattgtagaatcttgtccgacagagcgaaaggctgctgcgatgagtcttctgcattctttttactgttggggtcatgtagctgtgatcctgatctcgacggcattttttgccattgcggggattgagaactggaggatactggctgtgatctgggcgttccttccagcgctgaatgcggtatattttggaatggttcccattcaggcagaagaggaggacgttgagggaattcctgtgcggaagttgtttagaatgaaaattttctgggtactggtattgctgatgatctgtgcaggggcatccgagcagggaatgtcccagtgggcgtcagcatttgcagaatccgggctgcatgtaaaaaaagcagtcggagatctggcaggaccatgtctttttgcactgttaatgggaagttccagactgctttatgcgaagatgagtgagcggatttccttgcagaaaatgatgctttcaagcggaattttgtgcattgtaagttatctgcttgccgcattgtctccaaatccggtactggctctgctgggctgtgggctttgtggattttctgtcggcgtattctggccgggaacgtttagtatggctgcagcatcctgtccgaaagggggaactgcattgtttgcactcctggcactggcaggagatcttgggtgttcttccggtccgggagtcgttggcattgtatcgggagcattttccgagaatctaaaagcaggtcttttggcagcgatcgcgtttccggtgctgctgattattggactgcaattgttgaaagaaggaaatagagagtgagggggagcaagatgaaaaaggaaatgacaaatgatatgacagtgggaagtccggtaaaactgatcattcagtttatgatcccgatgtgtcttggaaatgtatttcagcagttttataacattgcagattcgatcgttgccggacaatttttaggtgtcaatgcgcttgcggcaattggaagtacagggtctttgatgtttttcgtgaccggatggctgcagggactgaccagtggatttgcaattttagtatcgcagtggtttggtgcaaaagatatgaagcggatgcggcattacgtggcaatgtcggtttatctgacagcagcatttgcgctcctgatgacaatcggttttgaatttgcaaatgagccgattttaagactgatgaattcaccggaaaatctgataacagatatcaaaggatatatggcggtcatatatggtggtttgatcgtaactgcggcatataacgcacttgcagcagtactgcgtgcgttgggagattccaaatcaccgttgtattttctgatcatttctgcgatcatcaatgtcgttctggatattgtgtttattgtaaattttgggatgggcgtagaaggatgtggatatgcaactgtgatcgcacaggcaatttcagcggttctgtgtctggtttatattgggaagaaattcccgatccttcggcttggagaagaagattttaaaatttctttccagagtatgggacgccttctgtcactgggaattccgatggggctgcagttttctattactgcgatcggaacgatcattgtgcagggagcggtcaatatttatggtgcagtgtacatggcaggtttttctgcggcagggaaattgcagaatattattgtaacagtttttactgcttttggcgcaaccattgctacatatgtgggacagaaccggggagccggaaagatggaccgggtgcacaaaggggtaaagtatacgcagatcatggtttttgtatggagtgcggttacaatggttctggtgtattttctcggaagagaaatgacattgttgtttgtcagcggaacagaaacacaagtgcttgatgcggcagagatttatttccacgcagtattctgggcatatccgtttttgggaagcatttttatctatcgcaatgccttgcagggaatgggatatggattggttcctatgctgggcggagtatttgaacttgcggcaagggcattgatcgtatttgcagtagcggggagaacaagttttacgggagtatgtctggcagatccggcagcgtggatttcagcattgatcccactgattccgtactatatctacgtgatgagaaagtataagaagaaaaagaagactgtagaataaaagtcaggtcagagacaatggatgaaacagagcatctgttgtctcttttttgtcagttgtgttgtaaaatgtgcaagttatgcagaaaatctcaaaaagagaaagaaatgtgataaggtgtggacatagaaagccggccgcaggggcaggtgcgcatacgaggaggtgagaaaagtcatgaactggtgggtggaaaaatggaatcgttttgcaacaaaacatccaaaactttcgaaatgggtatatcagattgcattctttttcgtattcagcatgggagtaaccattgtccagtacttattttttacatttatgccgggtatccttggagaaaaattggcaggaacagaatttatgtggccacaggtgcctatgaagatagcaggtgtggagttcacatggagtttattagggtataatgtattgagagatgcatccggtgcagttctgatcggtggtggtcttggatattttatcagttatgaaacgggatcgttcgttgcgcagtgtatcaattttccgctgcagagaaatattacttttaaaagccatggaaatcctgtatatcaggcaatgtggtattttatagcgtggattctgatctcactgatctgcaatggttttaataatctgtggatgccgatcgcatctgcatgggtgccgccggcgatatataatattcttgtgacatttgttacaggaggcgtgtccatggttatcttcttctttgtatttaagattatcttcccggaaggagaagcaaagaagtagtataaaagaaagaacgtaaaaaggagaaaagggtatgaaagagaagaaaggctggagtgttgaaagaattgcaaaaacagcagttctgacggcggggattttggttgtaattgcaatcattgcatcactgatttttccaaatccgataggagcaaatgtaagactgatcacaagattgatttttgcaggaacagtagtgactgcggttttcattcttgcaatgtggatttaccgggcaagaaaaaataagagaatgctgaagattttttcagcgttgttgtgtattgtgttggcacttgtgattgtgatcaatctggcagttatgaacttttatgtaatgatcaatcagttcctgcatagaaatacagcagatccggaaactgttgtcaacgagacacaagtggcaagggaagtaacagaacagattgaggaagaaggtctggtattgctcagaaatgagaataaagcgcttcctatgacagaaacaaaagcaaacgtatttggattcgcatccgatgcgatcatctatggcggatccggatccggagcggcagatgagagtaaaaatgtaaacttaagtactgcgcttgagaatgtaggaattgaagtaaatgaagaactggcagagttctataaaacaaagaatgatgaagccaaggcaaaaaatggagttacgatcgcgttaagtgattatagtgtcaaagaaccttcggtagaagactatgaaaacggacttcttgaaaatgcaaaagagttttcagacacagcaatcgtcgtgtttggccgtgccggcggagagggtgccgatatgccaatggatatgggtgcgtatgaaggcggtacagaaggaagacattatatggaattgacagagaatgaagaagcaatgtttgacatggtaaaggaaaattttgaaaaagtaatcgtgttgatcaactcttcttctccaatggaactgggatttcttgaaaatgagaaggtagatgcagcaatgtggatcggaggaccgggatccgttggattacagggtgttgccaatgcactttgcggagaagtcaatccttccggacgtttggtggatacctatgcatatgatgcaacttcaagtccggcatatatgaatatcggagattttacttatacaggaacagaacatgaaaatggcggtatgcttggtggtgtggcaccatataaatttatgaattaccaggaaggtatttatgtgggatatcgttattatgaaacggctgcacaggatggttatattaattatgatgaaacagtgcagtatccattcggatatggtctgtcatacacaacatttgaacagaaaatgggagcactttcaacagaaggagatgctgtcagcgttgatgttacagtcacaaatacaggaaatgttcctggcaaagaagtagttcagttatactatacgccgccgtacacaaagggtggaattgaaaaatcacatgttgttttggcagcatttgataaaactgaggaattaaaaccaggtgaaagtcagacgcttacattgtctttccaaaaagaagatatggcaagctacgattataaagaggcaaaagcttatgttctggaaaaaggtgactatgcgatcaaattgatgaaaaacagtcatgatgtgattgatcagcgtacatataaagtaaacgaaacagtcgtaaacagagaaagtgatctggtggaagcaacgaatcagtttgatgatgtggcaggagatatcgcttatgtcagccgtgcagactgggcgggcacgatgccaaaagaaaaggcgaaagatcaagtgccatccgaggaagttctgaaagcattgcagaacacagaagtggaaacagatccggctgcagaggatattgtatttaaaaaacatgggctgacactcaaagatgtcaaaggcttagattatgatgatccgaaatgggagcagttattagagcagttatccattcaggatatggaacagttgatcggaatgagtgggtggcagtccgttcgtatcggatctgtaggaaagccggaagtactggatgtagacggaccggcaggtttgaatggattgatcaacggaacaaaaggaaatcagtatacaagtgcggttgtagttgggtctacatggaatacaaaattgccggaagaatttggtaaggctttgggagatgaagcttatgcaaataaagtatctggaatttacggaccggctatgaacattcatcgtacaccgtttagcggaagaaacttcgaatattattcagaagatggtctgttatccggaaaaatgggagcagctatggttcgcggctgcaatgagaaaaatgtgtacacttatatcaagcactttgcgttaaatgatcaggagacaaatgcaatcggtggtgcaaactggtgtaatgagcaggcaatgagagaactttatctgaaaccgtttgagctttctgtaaaagagggcaagtcaaaagcaatcatgactacatggagccgtgtaggagcaacctgggcaggtgcaagcaaaccattgcttcagaatgtattgagagatgagtggggatttgaaggttttgtcattacagataatgcaatgatgggagatttccagaatgcagatcagggaattgcagcaggaaatgatatgatgctgagctctactcaaaaagaaatcaccatcgacgaaacagcagaaggacgtcagatgatgagaaaagcatgtcataacattttatatgtcgttgcaaacagtaatgcacttgaacatgcaagaccgggagtaccgggatggatttatgcatatgttgctttcgatgctgtcatgttaggattgattgcactcggatttatgggatgtacgaaaaagaaaaaagtaaaagtaaacaaagaaaaatagccggtatgtcgaaccgggtatcagggggcatcatgagagagcccccttttagatttgagaaaaaaattctgatttctttatagattcttccaacgacttcaaaaaacaatcaatcaaaggagcagttagcacaaaaggatgcgcagattgccagacttctggctcagatggaagagaaagatacgtaattgttgatccatttatgatgatagaacaaccagttgtgcagaaatccccccgtttctatggatttgtgatagagtagtcttcagaaaaatgaagagataaagaagtgaaaggtgagagatatgaaacacgcagaaatcattgcgaaaatgacagtggaagagaaagcagcgatattgagtggagcgtccgagtgggagtcaagagagatcaaacggcttggaattccggcggcgtttttttcagatggtcctcatggagtgaggaaacaggaaggagaaggcgaccatctcggactgaatgcatctgttccggctacctgttttccaacggcagccacgattgcgaacagttgggacgaatcgttgggtgaagagatcggaagggctttgggagaagaagcatcagcattaggcgtagatgtacttctgggaccgggactgaacattaagcgcagccctctgtgtggaaggaattttgagtatttttctgaagatccttatctggcgggaaagatggctgcatcttatgtaagaggaatccagagtcagggaatctatgcatgtccgaagcattttgctgttaacagccaggagcttcgcaggatggcaatgaattcggtgttggatgaacggacactgagggagatttatctgaccgggtttgaaattgcaattaaagaaggaaaagcaaaatccatcatgaccagttataacgaggtcaatggagtctatgcaaatgaaaatgagcatttgttaaaagaaattttaagagaagagtggggatttgacggacttgtagtcactgactggggggcttcgaacgatcatgtaaaaggagttgcctgtcgctctaatcttgagatgccggcgccgggactggatgcggcacgagaagttctggcagcattagaagaaggacgcctttccatggaagaactggatcagtgtacggacgatcttctggatgcagtactgacactggcaaagaacagagaaaaacgtgcgcgtgaatttgaccgggaagctcaccatacgcttgcgaaaaaagctgcaagagagagtattgtgatgcttaaaaatgaagaaaaaccgttccggctgcttcctctcaaaaagaatacaagagtggcactgatcggagattttgcatctgttcctcgttaccagggggcaggttcttctctggtgaatccaacgaaagtagaaacaatggagcagatgatcagcagttatccgattcagtgtattggtacagcaaaaggatatcagagaacaggagaagcagatgaagtactgaaaaaggaagcagtgaatcttgcggagatggcagatgtggttatttactgcttcggtctggatgaattgagtgaatcagaaggactggatcgtacgcatatgcggattccgcagaatcaggtggagcttctggaagcaatggcaaaagtaaactccaatattgtaggtgtattaagtgcgggatctgcagttgagatgccgtggcattcctgctgtaaggcattgctgcacggataccttggcggacaggcttctgcaggagccatgctggatgtgctgaccggaaaagccaatccgtccggaagactcagtgagacatatccggttcgctatgaagatactccggcatttaaatattttccaagtacagagcgtaattcggaatatcgggagagtctgtttgttggatatcgttactatgatacaagtaaagtgagagtgcagtatccgtttggatatggtctgtcgtatacatcgtttgaatactcagacttgagagtaacggcggatggagttgaatttgtactgaccaataccggaaagatggatggtgcggaagtagctcagatgtacgtatgtgcaccgaaaggaaaaatcttccgtccggataaagaattaaaaggattcacaaaagtattcctgaaagcaggagaaagcagaaaagtacagattttgtttgatgataagacattccgttactggaatgtagagacagacagctgggaaaaggaagcaggaagatatgaaatctgtattggcgcatgtgcattggatatccgattgagagagacactggaaatagaaggaacaactggcacaatgccatatgacgctgaaaagatgccgtcatatttttcgggaattatcagagatgtaccggatgcagaatttgaaacacttctgaagcaaccgatccaggatggaaagtggagcggtgaactgggaatgaatgacgcaatctgccagatgtattatgcaaagagcagactggcaagaatgatctacaagattctcacaaatctgaaaaagaaaagtgaggataagggaaaaccggatttgaatatcctgttcatttataatatgccattccgcggcattgcaaagatgacacatggtgccgtcagtatgaaaatggcagagggtatgacagaagtggtcaacggacatttcatgaaaggaatggggaaggtgatcagagggttctttgcaaaccgcaaagccaataaagaatacgagaaaaagctggaggccggaaaatagaaatgcggagaacaaaaaggagaaagcacaaaaaactttctccctttttgtatctaagtatccagcgggatcaacacctgcagagtaaaccaatggtctttcgcatgaagtgtcatggaaccgccatatttttgggctgcgtgctggatactttttaatccgtagccgtgataccctgcattttgttttgtcgtagacggaagttgatctgattttaaatgaaggatggtatctgtatagttttcacattgaatcatcaacagctgatttttttgatacatggacagcgtgatcagtcgtttctccgggtcatcaaattgagagacacattcaatggcgttgtccagtgcatttccaaaaatagaacagatatctttgacgtgcatgaaagagatcagtttgccgtctgccatgcaggtaaaagtgatgtgtttttgcatacaataggtacttttggttgtcaaaaccacatccagtacactgtttccagtattggtgaatgcttcttgtgtatggatcgcctcttccatttcggagagatattgttccttctttttcgggtcttgttcagaacggatggcgatcatataatgcttcagatcatgaaattctcttcgcaggagttcaatattgtcaatcgagagacgatactggtcatactgacgctgcagcaggatgttcatggcctgattttcgctgcgcatccggagttcttctcttttttcctgcatggagaaaagcatgacaagtccaccaaaatctaccagtgtacggacatataggatcgaactggtagcactggaaaacggggtgtttggcataacaaaactgatattgctgatggcaaatgcaccaagagcaatcagaacggcgctgagaagttccttcccattgatctgaagtcgttcgtctgtcggaaaatgtcctcgttccagaaaatagtatcccacatagatgcctgtatacagcactgtcattgtgacagctacaaaagccggactgagctttccataggtcagcgcccaccagacatagagctgccagtgaagtgaagctgcaaattccgcaagaaccagtgcttttgcacaacagaaccatgcatccagccaagttgtatcacagagaagatgcagaagtgcacacattaaaaaggcagctccgatcatacagggaatccagaagtagattggaagagttcctgcaaattcatgataggcaacaaaaacaatcaggcttcctcccagaaaaaatgacagtttcaagccggatatttttcggcgcaggaggaagatatatatcaggcaggcgccccattcagccaatgcagtataaagtcttggagtatccatcaaagtggtcagattcatcgggtgacacctcccatatagtctgtcagagcctccagaaaagctttctttttggcgcggctgacaggcagtgttgtggaatcagacaggatcacattgttctgtacaatgcccgttacatgcatcaaatgaatgagataggcattatggcatttggaaaatcctttttcattcagcagcgcttcaatctttttcaaaggtccggttgtaagaaaatctcctttttctgtgtggatgagaacatgatgccgttggctttcaatataatagatctgaccgatatccagacgcatctgaccgccctctacttcaattgtcaggtaatttttctgctgcttctgagttacttttttaattgcttttccaagaatctgagaaaaggcaaggtaagataccggtttgaccacatatccaagagcatccacaagatatccctgtacggcaaacgaaacggtggatgtaataaaaatgaaagacacgtcttcgtccagctttcggatcttttctgcggccgtcattccatcaagatgtttcatctggatatccataagaatgatgtcgtagtcagctttataatctgtgacgatatccagcccgtcatgaaagatggaggtatggaaggaaagggaatgctcttccccatattgctccagatatccggtgagtacccggatataggaatcttcatcttcaacaattgcaattcggatcatagagtctccttttcttttcgtatcataaaatttgaaatcagttctattttagcggaatcggaatgaaaaagcaattcacaacaaaagtttggcaaaacaaaaatggactggtaggttgaaattaaacaaaaagacaagtataataaaaatactgaaaaacaaagaaaaagagaggttttttagtgaaggaggtaaatatggccgagcagtatcgtggtatggcaattggaatatttgaactggacagcgaatgtgcctgttttgtggcgttggatgcggcagcaaaagcagcagcagtacagatccagggagtggagagaaatcgtctgggagccggtgcatgtgtgaagatgcgtgggagtatttcagatgtaaaagcagctatggaggtggcgatccgtacggcagagccaatcgcaaaggttgtttcccacacggtgatcgcatccccgtcagaggagacagaaacggcgattgcaatgacgattacaaaataaggagagattaatatgacatacggagcatttggactggtagaagtccttggggaggcaaatgcggttctggtactggatcggatgttaaagactgcagaagtttcttatgagacacaggatacaaagtgcggagggcatgccctggttttcgtaagcggaagcgtatcagctgttacagcggcagtggagagtgtaaagttggcaccaccgtgtaacgtatttcagacggcggtgatctccaatccatcccaggagatggttcagattgtagaaggtttcaaagccagaaagaaaaaataaaatacagattcaaaggacagcatatcaggtggaagtgctgtccttagtttttatacagactctttgataagatccgacagagaaccaaaagtatatcccatttcttcccatttggaaagcagttcatccatgatttctccgtttgttcgggaagtattatgcagcagtacgatggctccgggatgtacgcgggacaggagtttgtcgaaagcttcttcatgagtaggctgcgcatcctgctgccagtcaacgtaggcaagactccagaaaaaggtgtggtatcccaggctttgagccattttcagattctcggtactgtaaattccctgtgggggacgatagtattttatcatgtcagtaccggtgatttcctgatacagagcttctacagcggaaagttctttttggaaattttcaagagaagaaattttagacatatccggatgactgaaagtatggttccctactgtgtgtccttcttttgtcatacgttggatcagatcaggattgtcacggacaaaattgccgactacgaagaaagcagcaggaacctggtgtttctttaatgcatctaaaatagcaggagttgccccgttctcatatccgcagtcaaaggtcagatataaaattttttcttctgtatcctgcgcataataggcagcatattgcttcaaatcttcaatggaagcgttggcggttggaagttttccttcctctggaaaactaagtccccagttttcagaggctgacagtatggaactggatacaggggcggaacgagccgaatgttcaatttttccggcaacagaaccgaggaaaaaggcagctgccagaagcagaatgcggccgaaacagcgcatgaggatcttgtgatcagattgggttatgttcatagaaaggctccggaagttcatttattcctactatattcaggaaaatgagaaattatgcttaaggtagactttttagaaaaagagtgatacagttaattcgaaaagtgaatgagaaatcaggggtgacatatgaaaaaagcagcattattttttgatattgatggaacgatattgagtgaagagacaaaagaaattcccaagagtgcgatagaggcgcttctggaagtgaagaaaaaaggtcatctgttgtttattaatacaggaaggacgatgtgttccattccggcagagctaaagcagtttgcatttgatggatatttatgtgggtgtggaacgtatctgacatatcatgatgaggtattgtttacaagaagcatcgagaaaaaacgaggcagagaaattttgaataaaatggcagagtgcaacctggatggaatcgcggaaggaacagaggatatttatcttccggagagaatctcccggtttgaacgtctggagacatccaggagatattttcactccagtggactgggacgggaatgttatttggaaaaagatgattttatctatgacaaggtgtttatttatgcggatgagagaagcaatctttcggaattcttcagcttcattgaaacggatatggaagcaatcgaccgcggaggcaatgcctatgaaatcatacaaaaagggtatagcaaaggaacagcatgcgatatgatcttgaaaaagtttggtttggagctggatcaggcgtatgtgtttggggacagcatgaatgatctttccatgttccagtacgcagctcatacaattgcaatgggaaatcacgcaaaaggtctggaaccttttacggagtacgtgacagcagaagtagaaaaaggcgggatcgcacaggcgatccgccattatgggttagacggaagaggaggacaagacacaaaatgaaattatttgtatatagttacaggaaatttgatgaggatgagtatttccagaaattttccagggagtatggagtagaacttggaatctgttatcagggtccatccatggagaatgcgcatcttgcggagggatacgactatatcagtattctcacgagtaagatcgatgcagcacttgtaagaaaatttcgggaactgggggtcaagatgatctcaaccagaacaatcgggtatgaccacattgatctggaagcagcgaaggagtgtggtatgaaagtcagcaatgtgacatattcaccggaatgtgtggcagattatacgatgctgctgattttgatgtccattcgaaacatgaaacggatttgccagcgggcagagatcaatgatttttctctgccgggaattcagggaaaagagctgcataattttacggtaggagtcattggaacagggaagatcggacaggcagtgatccgggatctgagtggatttggatgtaagatttatgcctatgacgtctatcaggcagagaaagtgaaaaaatatgcagaatatgtggacaatatccatgaaatttatcagaagtgtgatctgattactcttcatatgccgttatttgaatccaactttcatatgattgatgaaagtgcattgtcacagatgaaagatggagttgtcctgatcaatacggcaagaggaggcctgatcgatacaaaagcgctgatcaaagggctggagtcaggaaaggttggagcggcaggtctggatgtgattgaagatgaatttggactttattataaagatttgaaggcacagtgcttaagaaaacacgatctgtccattttgcgggcctttccgaatgtggttgtgacaccacatatggcattttataccgaccaggcagtcagtgatatggtcaaacattccatcctgagttgttgtctgaatgagcagggcgaggaaaatccgtgggtggtagaagtataaaaaacgggcgggaagtgatcatcagatgacttcctgcccggtttttatgaaaaatagagctctttaatcttatcaaccggcatctcttgtccggtccagattttaaaggcctctgcaccctgatagagcagcatatagagtccgttaaaggtcgggcatccggcttctctggcaagacgcagcagcttcgtttcttttgggttgtagatcacatcagaaacgatcagatctttgtggaaaaacgatggatctgtgatgatggaggaatctgtattcggagccatcccaacagaagttccattggtcagaatatagctgtctgcaatctctcttcgaaggatggaatcgtcttcaaaatcaaacagctgtaccttacagtttgtccgttcatttaatgtctgaacaatctgctcggcacgggcataaaactggtcatggatgctaaacacagagatttctgccaatccatccaaagccgcctgaaccagaatagaagtggcagcgccgcctgcaccaagaagcgtcatcttttttctggtcagatcataaccggcatcttttgctgcaagcatatatccggctccatcggttgtgtgcccggtcaaaatcccatgatcatttacgacggtattgactgcaccggaaatttcagcagcaggggagagtttgtcacaaagttcgcacattttatttttgtcaggcatggtcagattgaaaccacgtacattcatggcacgaagtccctctacggcagcagaaagtttttctgttcccacatcaaatgcaaggtagacgtaatccagtccgagatgctcaaaagaagtgttgtgcatcataggagagatactgtgtgcaaccgggcttccaagaagtccggtgagtcctgtatgtccggtaatctgtttcataagcggtttcctcctgttttagatttcatctgcgtgatcaaaaaatgtaagatccgcaggatatacataactctcaccaatctgatgcagaagcaccaggttcagatgattgttcagatttttcttgtccagtgaaatagcatctgtgagcacatgcattggcagattgcaggcatccggaagtccgtaggactttaagagctgctgaatttccattgcagtacccggttggcataaatttttttcttcagcgatcttagtgatctgatacataccgatccccactgcttctccatggctttcccgctcatagtgaaaatgttgttcgatcgtatgggcaagtgtgtggccgaaatttaaaagcatccgttccccggtatcgaactgatcctgttccaccacctggcgcttgatgtctacacagcgataaatgatatctgccagaatatcctgcagattgtcgaaagagccacgagtttttaaggtttcaaacagagcggcatctttgatgcagccatatttgatgacttctcccattccgtccataataaaatgagaaggaagtgtgtgcagaacctgagggtcgatcagaaccagttttggatgataaaatgcacccaccagattctttccctgtggaagatctacagcaacttttccgcctacagaagaatccacctgagccagcagagaggtgggaatctgaacaagccggatccctcttaaatagcttgccgcagcaaatcctgtcaaatctccgatgacaccgcctccaagtgcaatgatcagatcactgcgggaaaatttttgcttaagcagtgcattataaagtgtgggaagggtcccgaatgcctttgttggttctccgtgaggaagaaccagttcatggacttcataatcgtgaagtgaagttttcaattgttctccgtacagtggaaagacattgtcatcagagatgatcatgatcttttttccggaaaagcaggaggaaatataagcccccgcattgttcagaatgttgttttcaatataaatgggatagctgttttcccctaaatttactgtcagtttcaaaaaaatccctcctgttttgtcagattatacctgttttccgacaacctgtgcgatctgccggatctgagtcagaagatttgtatatttttccggttttaaggactgggcgccgtcgcagagtgcacattccggatcattgtgtacttcgatcatcaatccgtcagcgcctgcagcaacagaagcttttgccattggttctaccaaccaccattttccgccagcgtggctcggatcgataatgacgggaagatgtgtttttttattcagaaccggaatgctctgcagatccagagtatttctggtgtatgtttcaaaggtgcggattccgcgttcacagaggatgacattttcatttccggcggccatgatgtattctgcagacatgacccattcttcataggtggcattcaacccacgttttaaaagaatcgggcggtccagctgccctaattgcttgagcaggtcgaaattctgcatgttgcgcgcaccaatctgaatcagatctaccttttcgttgaagatgtccagatgatctggagacatcagttctgttacaattggaagtccggtttcttcgcgaactgcacagagaatttccagaccttccagtccaagtccctggaaagagtaaggacttgttcttggtttgaatgcgccgccacgtaacatatttgctccggctgctttgacagatttggcgattccaagaacctgatcataggattctacggaacaaggacctgcaatcagtgccaggtggtcgccgcccactttgacaccagatacatcaataatggaatcttccggatgaaatgcccggtttgcaagtttataaggctcctgcacgtgcatgactttatcaacggaagcatcgacttcaaacaggcgggcatccagacgagtcgtgtctccgatgcatccgatgattgtcatttcctgaccgcggacaatatgggtatccagaccattgcgtttgatctgatgttctactctggcaatatctttgtcagaggtatttggctttaatacaataatcataatggaacctccagctatgtaacttaatactgtaaaattttagttgtttaaagtgcaaaactaaaaatatcataaaacaatatgcgcagattgtcaatgttttcaagatggaatttccaattttattttgggaacaggggaaaacgtggtagaataaaaaagaaagaaaaaggatgggggaaaagatgtaatgaagaaaaatgatatgtggaaacgggcacggcggattccggtcatgctgatcacagaagggctttgtgtggggctgatcggtggttttattgtattgctttacagagtagcgctgacttttgcgggaaactggctgataaagattctttcctatataaagggcaatccgtttcgctgtgcggtgtggtttctgatcctgatggctcttgcatggatcgtaggaagactggtgaagtgggaaccgatgatttcaggcagcgggattccgcaggtggaaggggaagtatccgggcgcctttctcagaattggaaacgagtgctgccggcaaaatttgcaggcggatttttgtgtatgctgggagggctttcgcttggaagagaaggcccgtcgattcagcttggagcgatggccggacagggaatatccagagctttggggcgggggaaaagagaagagaagtttttgatgacatgtggggcgagtgccgggctttcagcagcgtttcatgcgccgttggcaggtatgatgtttgcagtagaagagattcacaaaacattttcaattccgattcttcttccggtcatgacggcttctgtaacggcagattatattgcttcccacattcttggtctggatccggtattccattttcagattacagaatatctgccgcaaaactattactggcttttgattcttttgggaattctggtaggagtatccggcgtgttttacaattgggggatgttaaaagcgcaggaattgtatcgcaaaattccgtttttaaaagagacagggcgtttgttgatcgcatttttgacggcaggagtgctgggactggtgatgccgtctgtattgggaagtggttccggattgatcgtcagtctgacaaagggtgagatggttcttggaatggttgtgctgacgttggttgtgaagtttttattttcagcagtcagttttggttcaggagctccgggaggaatttttttcccgcttcttatattgggagctttgctcggggcagtatttgcaatgacgggtgcagaattttttggactggatccggtgtacatcaacaattttgtattgcttggaatgacagggttctttaccgcgatcgtgcgggcaccgctgacaggcatcatcctgttgtttgaaatgtctggcagcatcagccagatgctttccctgtcaattgtgtcggtaacggcatatattgtggcaacgctgatgcgttcagagccgatttatgacagccttttgaagagaattctcaaagcggatactatagtgcatgacaaatgaaacaacttatggtatacttcattttagaatatgcgtatgtggcagagatgccagataccaaagagatttgaaggagccagacagatgaaaagagtattgttaaaactgagcggcgaagcacttgccggagataaaaagacaggatttgatgaggcaacctgcataggagttgcaaatcaggtgaagcagcttgtagatcagggaattcaggttgcgatcgtgacaggcggcggaaatttctggagaggccgtaccagtgagacgatcgaccgtacaaaggctgaccagatcggaatgcttgcaacggtgatgaactgtatttatgtgtcagatattttccgtcatgtggggatgaagacagaagtattcactccatttgtgtgtggagcatttacctccctgttttcgaaggacgcagcagttgcagctatggaatcaggaaaggtgatcttctttgccggaggaaccggacacccgtatttttctacagatacaggagctgttctgcgtgcaatcgagattgaagcagatgcgatgcttctggcaaaagccattgatggaatttatgacagtgatccgaaggtgaatccggaggctaagaaatatgacgagatctccattcaggaagtgatcgatcagaagttggcagcagtagatctgacagcctctattctctgccttgagaataagatgccgatgctggtatttggattaaatgaagaaaacagtattgtagaaacaatgagcggtacatttaccggaacaaaagtgacagtataaggaggacaaaaaaatggatgaaaaattaaaagtatatgatgacaagatgacaaaaacgatcaacaatctgggaagtgagcttgcagcaatccgtgcaggccgtgctaacccacacgtattggataaactgacggttgactattacggagtactgactccgatccagcaggcggctaatgtatctgtaccggaagcccgtatgatccagatccagccatgggaaaaaagcatgttaaaagagattgaaaaagcaattttgatgtctgatatcggaatcaatccgaccaatgacggaaccgtggtacgtttgatgttcccggaacttacagaagagcgaagaaaagaactggtaaaagatgtcaagaaaaagggagaggcagcaaaagttgcaatccgcaatatccgtcgtgacggaaatgatgcattcaaaaagctcaaaggaacagagatttcagaagatggaatcaaagatctggaagattcacttcagaaactgacagacaaatatattgcagaagtggacagagcagtggaagcaaaatcaaaagaagtgctgacagtttaggatacagcctggatagcaggccaatattacgaaacagcaggaggggcagatataaagaggcccctcttttccatcttatagatggaagttctgcaaaaaggaggaaggacaatgaatgtaccgcagcatgttgcaatcattctggacgggaacggacgatgggcaaaagcgaagggaatgccgagaaattacgggcatgcacagggtagcaagaatgtagagaaaatctgtgaggaagcatggagaatggggatcaagtatttgacagtctatgcattttcaacagagaactggaatcgtccggagagcgaagtcagtgcgctgatgaagcttttgcgtaattacatgaaaacatgtctcaagacagctgcaaaaaatgatatgaaagtgcgggtattaggtgatattgcagcactggatgaggatatccgaacacggattctggagcttgaagaggctacaaaaaataacggggggctgaatttccagattgcattgaattatggaagcagagatgagatgatccgtgctatgcgccgtcttgcaaaagactgtgtcgacggaaaggttcagccggaagggattgatgagacggtatttgagtcttatctggatacctgtggaattccggacccggatctgctgatccgtaccagtggagaactgcgtctttcgaattatttattgtggcagctggcgtatacagaattttattttacagagattccgtggccggattttacaaaagaggaattagaaaaggcaattgcgcagtataataaaagagacagaagatacggcggtgtgaaggaggaagaagatgtttaagacacgtcttttaagtgggattctcctggtggtgatcgctctgatcacagtgatcacaggaggaaatgtactgtttgcaactttgtttttgatcagtatgatcggagtctatgagttgtacagagtgtttgagattgaaaataaagcagttgggatctgcggatttttgtttgcagcaggatactatggtctgttgtatgccaaaccgctgcttccagatacaacagattggttcatgttgttatttatggcatttgtgatctgtctgatggcagtgttggtattttcttatccaaaatatcggacagagcaggtgttggcagcatttttcggagtattttatgtggcggcaatgttatcttatatttaccagacaagaattctgccgggcggagtattccaggtatggctggtgttcatttgtgcatggggatgtgatacctgtgcgtattgtgtgggaatgcttatcggaaaacataagatggcaccgaagctgagtccgaagaaatctgtagaaggcggcattggcggtattctcggagcagcactgatcgcagtgctttatgctcttgcgatcaatcactgggcagatgcgggcgtgagtgtgaccagctttgctgtgattggcgcagtgggaggtgcaatttcccagatcggagatctggcggcatccgcgatcaagaggaatcataatatcaaagattacggaaagctgatccccggacacggtgggattctggatcgatttgacagtatcattttcacagcaccgatcatttattatctttgtgtacttctctaagaaggagggagaatggatatgaaaaaaatagcaatacttggttcgaccggttccattgggacacagacactggaagtggtcagagaaaaccaggatatccaggtcatggcactggcagccggaagtaacattgagcttttggaagcacagattcgggagtttcggcctgtgctggcagctgtctgggaagaagaaaaggcaaaagagctcagagagaatatcaaagacttgaatgtaaaagtggtatccgggatggatgggctgaaagatgtggcagtgcagaaggatacagaaatcctggtgactgcgattgttggaatgatcggaattcttcctacgattgaaggaatccgggcaggaaagaacattgcgctggcgaataaagagacactggtgacggccgggcatattattatgcctctggcaaaagagtatggagtatccattcttccagtggacagtgagcacagtgcgattttccagtctttgcaaggaggacagcatcaggcactgtcaaaaattttgctcacggcgtccggcggaccatttcgagggaaaaagagggaagagcttctccatatccaggtagaagatgccctgaagcatcccaattgggagatgggacgcaagatcacaatcgactcttccacgatggtcaacaaaggattggaagtgatcgaagcaaagtggctgtttgatgtatctgtggatcagatccaggttgtcgtacagccgcagagtatcattcactccatggtagagtatgtggacggggcagtgatcgcacagcttggaacaccggatatgaaactgccgatccagtatgcattgtattatccggaaagaagatatcttccgggagatcggctggattttgggacactttcccagatcacgtttgaacgtccggatatggagactttttatggcttgaaactggcatacgaggcgggaaaaattggaggttctcttccaacggtattcaatgcagccaacgagcgtgcggttgctatgtttttgaatcgggagattggctatctgcagattccggagatcattgccggttgtatggaaatgcacaaagtgattgcagatccaaccgtagaagaaattcttcagacagagcaggaaacttatgaatatatcaaaaacaggtggtagtatatgggtattattttagcaatccttctgttcagtttgatcatcatcatccatgaactgggacattttacgctggcaaagttaaacgggatccgtgtagatgaattttcattgggaatggggccgactctgtttggcaaggagtttaagggaaccaagttcagtttaaagctccttccgcttggaggcgcctgtatgatgggagaagatgatgcagatgatcaatcagaaggcagttttaacagcaaatctgtgtgggccagaatctcggtcattgcagcaggaccggtgtttaatttcattctggcacttctgatgtctgcaattttagtcggagcagcgggatatgcggttccggtgatacaggaagtggaacccggatcttcgggaagtgaacaggggctgcagcagggagatgtgatcaaagaaatcaacggaaagaaaattcacatttatgaagaatttcaactgtataatctgacacacgggacatctgacacagcagagctgacatttgagcgtgatggaaaagaacagaccattcagatggaaaagcggctattcggagaagagactgcaaagagaatgggatttacctattcggcagaggtggaaaaaccgggatttttcaaaagtattcagtatggagcatacacggcaaaatactgggtagagtatacgctggaatgtctgaagatgcttctgacgggacaggtgggagtgaatcagctctcaggaccggtaggcattgtggatgtagtcaatgacacatatgatgcagcggcaccgtcgggatggtcagcagtgctcttgagtatgatgaatcttggaattttgatttcagccaacttaggtgtgatgaatctgcttccgattcctgcattggatggtggacggcttgtatttcttctgatcgaagcagtgagaagaaaacgggtctcaccggaaaaagagggaatggtacattttatcggatttgcggcattgatggttctaatggtattcgtaatgtacaacgatatcatgcggttattttagataaataaggaatgagaaaaacgtctctgcaaggtgataaggcagaggcgtttttttagatatccggctctatgttatttttttaatctgttttgcatatagttagaagaaacaggaaaaaaggaatatccatatgaatgacaatagaaatcgaagaggaactgtacagaatatcagaatgcagcaggagaatatcgacaggggaaaactgcggatccagatcacatctcaggtgaccgcatttccaatccagaatgcggaagtttccatttcctatacaggagttccggaaaatacgctggaaaaactacagacagactcttccggacagacagaagaaattgaactggcagcaccgccgattgaatacagcctgaatcaggagtcggatcgtcagccgtattccgaatatacattaaatatagaggcggaagggtttgagcctgtcagtatttccgggacagaaatcctggcagatgtgacggccattcagaatgtagaaatgcgtccaagagcagatatgcaggaaccgggggaagtgtttgtgattcctgcacacacattgtatggagaatacccggcaaaaattgcggaggacgagatcaaaccagtgacagaatccggcgaaattgtgctcagccgtgtggtgattccggagtttgtcgtagtacatgatggttctccgagagattctacagcgagaaattattacgttcggtatcgggattatatcaaaaatgtggcatccagtgagatttatgcaacctggccggacagtacgatccgggcaaatgtgctggcgatcatgtcatttacattgaatcgggtttacacggaatggtaccggaacaaagggtatgattttacaattacatcttccacagcatttgatcataaatggattccggagcggaatgtctatgatacgatttcttcagtagtggatgagatttttgccaattatttgtcccgcccgaatgtgagacagccgattttgacgcagtactgcgatggaaacagggtaagttgtccaaactggatgacacaatgggggtcgaaggagctgggagatcagggatatactccgattgagatactgcgatatttttatggcagtgatatgtatatcaatacagcagaagaaatttcgggtattccgtcttcctggcctggctatacattggaaaatgggtccagcggggcaaaggtccggcagctgcaggaacagttgaatgtgatcgcaggagcatacccggcattgccaaagattcaggcagatggagtatatggtccggcaactgcagcagcagtcagagaatttcagtccattttcggattgcctcagacaggaacggtggattaccgaacatggtataagatttcacagatttatgtaggtgtttccagaatcgcagaattgaattaggaatgattctgtgtgaaaaattcttgacatcgagaaaagtcttttttataatcaactggtactaccagttggttataaaagagggagaagaaaatgaaaatactaaggcaatttatgattatcctgttgatttcttttttgggagaagtgttaaaagcagtattgcccttgccggttccggccagtgtatggggactgatcctgatgctggcggcgttgagaactggcatgattaaactttcacaagtgtcggacgcagcagtttttctgatcgagattatgccggttatgtttattccggcgggagtaggacttctgaatgcatggggagtactgcagccagtctggattccggtcagtgtgatcactgttttgactacggttatagtaatggcagtgaccggaaaggtaacgcaggcagtgatacagaacagtaaaaagaaaagacagaatagaggacagcagtgatgaaagaatttttagttaattccgtattttttggtgcagcagtcagcttgattggatatgaggcaggtctgcttttaaagcgtaagtttaagatggcggtgttcaatccgttgttgatcgcgattctgtgcgtgatggcgatattaaaaattggaagaatctcatatgaagattacaatcggggtgcacagtatctgagttacctgcttacccctgcaacggtttgtctggcagtgcccttatatcagcagctgaatttgctgaagaaaaatttaaaagcagtggcagcaggaattatagcaggtgtattgtcgagtattctgagcgtcctgggtctttcttatctgtttggtctttctcatgagatgtatgtgacattgcttccaaaatcgataacgacggctattgggatgggcgtgtcagaagaacttggagggatcgtaaccatcacggttgcggtgatcatcattaccggagtgcttggaaatgtaatcgcagatgccatctgtaagatatttcggatcaaagaaccagtggcaaaagggctggcactgggaaccgcttcccatgcaattggaactgcaaaagccatggagatggggccggtagaaggagctatgagtagtttggctattgcagtggcaggacttttaacggtgatttttgcatctgtttttgcaggatgtttataagggggtaaaatatatgagacatattatcattaccattgggagacaatccggaagcggtggaagaaaaatcggagaacttctggcagagaaacttggaattccatgctatgggaaatcggaacttcaaaaaattgcagaaggaacggaagattatgaagaggttcaggcattttatgaggaagagccggtaaacagtttattgtatgcaattgcgaggaatcaatttgaacaggaagtggggagaatcccgttccaaaggattcgaaatctggcagatcaagagtcctgcattataataggtagatgtgcaggtcatatttttcggaaagatccgcaggcagtccgtgtttttgtccatgcagacccacagatccgcagccagagaattatggagcaggaggggatttctgaagaaaaggcaaaacaatttttggaagatacagacagcaggcgtgcttcttttcataaatattatacgcagagagagtggggaagggcgcaggattatgaactgtgtctggacagcggcgtgttgggaatcgaaggaaccgtagaaatattattaaaatatttgagattcagaggatttttaggggatgaatgaaaaaacatatgaaagagtgatcgaatacttaaaaggacagatacaatcgggcaatctttcctgcggaagcaagatcccatcggaaagagaactggcaggaagtctgagcctgggacgcaattccgtgcgggaggcgctgcggacgatggaacatcttggaatgctggagagccggcaggggaaaggaaatttccttgtgaatatgcctcagaaaagccttggtaatgtgttttctatgatgttgcttactggtcagagcaactacagggaagtcagcaggattcgatgtatcctggaaaaagaggcatttgcagaagcggtacgtttgaatgatccggaagtttgcggaagattaaaaacggaagcagaagaaatgcagattccagaaaaaacggcagagcatgacaggcggtttcaccaggaattgatccgggcaggaaaaaatcaactgctgatcacagtgatggaatcactgtcctggctctgtgaagaagaaatcacatatgtgcaggagaaaacaaaaagtcaggactggtgccggattcatgcagaaattgcaggggctctgaaggaaagaaatacaaaaagaggtctgcagtggatccaaaaacattacgataaaatcgacgaaattttatttcttaaaaacggttgaaatattcccgggtatgtagtataatctttacaatttgagaaaatttacgaagggataaggtgaacagatgaaggcatttctgattttagaagatggaaccgtgtttacaggaacaagcattggttcgacaagagatatgattagtgaaatcgtgtttaatacctccatgacaggatatttagaggtgttgacagacccttcttatgcgggacaggcagtcgtaatgacgtatccgttgattgggaattatggaatcacaccggacatggagtcaaggaaagcatggccggatggttatattgtaagagagctgtctcgtatgccaagcaatttcagatgtgaaggtacgattcaggactttttgaaagagcaggatattcctggaattgcaggtgtagatacccgcgcattgacgaagattttgcgggaaaaaggtaccatgaatggtatgatcacaacaaatgagaattacaatctggaagagattcttccgaagttgaaagcttacacagtaggggatgttgtttctaaagtaacatgcagcgagaaatatgttctggaaggaacaggaaaaaaagtggcactgctggatttaggagcaaaaaataatattgccaaatctttaaatcagcgtggttgcgaagtgactgtatatccggcccacacaactgcagaagagatcatttcatcgaatcctgacggaatcatgttgtcaaacggccctggagacccggcagactgcacttctatcattgaagaaatcaaaaaattatacaatacagatattccgatttttgcaatttgccttggacatcaactcatggcgcttgctacgggtgcaactacacacaagttaaaatatggacatcgcggcggaaatcatccggtgaaagaccttcagacaaatcgtgtatacatttcttcccagaaccacggctatgtggtagatgcagaaaatgtggatccgaatgtggcagtaccggcatttacgaatgtcaacgatggaacaaatgaaggactttcctatgttggaaagaacatttttacggtacagttccatccggaagcatgtccgggtccacaggattccggatacctgtttgacagatttattgagatgatgggaggagcgaaataatgccaagagacagtcgtattaaaaaagtattagtaattggatccggtccgatcatcatcggacaggcagcagagtttgactatgcaggaacacaggcatgccgttctttgaaagaagaggggattgaagttgttctgttaaactccaacccggcgacgatcatgacagataaagatatcgcagataaagtatatatcgagccattgacagtagaagttgtggaacagctgattttaaaagagcagccggacagcgtacttccgacactgggaggacaggccggtctgaatctggcaatggaactggaagaggcaggatttttaagagaacacaatgtccgcctgatcggtacaacttctgagacgatcaaaaaggcagaggatcgtctggaatttaaagcaacgatggaaaagataggagaaccggttgcagcttctctggtcgtagaaaacgtagaagacggtcttgcatttgcgaataagatcggatatccggttgtacttcgtccggcatacacactgggaggaagcggcggcggtatcgcacatgattctgaacagctggtggagatcctggaaaacggacttcgtctttctcgtgtaggacaggttctggtagagcgctgtattgcaggatggaaagagattgagtacgaagtaatgcgtgacggaaacggaaactgcattacggtatgtaatatggaaaatattgacccggttggtgtgcatacaggagacagtatcgttgtggcaccgtcacagacgctgggggacaaagaataccagatgctgcgtacttccgctttaaatattatcagtgagctgaatatcacgggtggatgtaacgtacagtatgctctgcatcctgagacatttgaatactgtgtaatcgaggtaaacccgcgtgtaagccgttcttctgcactggcttccaaagcgacaggatatccgatcgcgaaggttgcagcaaagatcgctcttggttatacactggatgagatcaaaaatgcgatcacacagaagacatatgcaagctttgaaccaatgctggactactgtgtcgtaaaacttccgagacttccgtttgataagtttatcagtgcaaagagaacactgactacacagatgaaggcaaccggagaggtgatgagtatctgcgacaactttgaaggtgcgttgatgaaagctatccgctctctggagcagcatgtagacagcctcatgtcttatgatttcacagatctgtctgtggaagaactgacagagcagctggagatcgtggatgatatgcgtatgtggagaatcgcagaagcaatccgccgcggtgtaagctacgaaaaaattcacgagatcacacagattgatgagtggttcattgataaatttgcaatcatcgtggagatggaaaatgcactgaaatccgaagagctgacaccggagttgttaaaagaagcaaaacggatggagttcccggataacgtgatcgcacagctgacaggaaagacagagcgtgagatccacgatatgcgtcatgcaaacggcattgttgcagcatacaagatcgtagatacgtgtgcagcagaatttgcagcagagacaccatactactattctgtatatggaagtgagaacgaagtagaagagactcgtgataagaaaaaagttctggtacttggatccggtccgatccgtatcggtcagggaatcgagtttgatttctgttctgtgcactgtacatgggcatttgcaaaagaaggttacgagacaattatcgtgaacaacaatccggagacggtaagtacagactttgacattgcagacaagctatattttgagccattgactccagaagatgtagagagcattgtggatatcgaaaaaccagacggtgcagtcgtacagtttggtggacagacagcgatcaagctgacagaagctctgatgaaaatgggagttccgatccttggaacttctgcagagaatgtagacaaagcagaagaccgtgaattattcgatgagatccttgaagagtgcgagattccacgtccgacaggaggaacggtgtttactgcagaagaagccaaagaagttgcaaacagacttggatatccggttctggtaagaccttcttacgtattgggtggacagggaatgcagattgcgatcaatgacaatgatatcgatgaatttatcggaatcatcaacaggatcgcacaggatcatccgattctggtggataaatatttacagggaaaagaaatcgaggtcgatgcagtttgtgacggcgaagacattctgattcctggaatcatggaacacattgagcgtgcaggaatccattccggagacagtatctctgtatatccggcacagagcctgacacagaaagcaaaagacaagattgcagagtatacaagaagacttgcaaaatctctccatgtcatcggtctgatcaatattcagttcatcgtatgtggagaagatgatgtgtatgtcattgaagtaaatcctcgttccagccgtactgttccttatatcagtaaagtaactggaattccgattgtaccgcttgcatccaaagtgatcatcggaaacaagatcaaagaactgggatacacaccgggactgcagccggaagcagattacgtggcagtgaagatgccggtattctcctttgagaagatccgcggtgcagatatcagccttggacctgaaatgaaatctacaggagaatgtctgggaattgccaagacattcgatgaggctctttacaaagcattccttggagcaggaatcaaactgccgaagttcaagaacatgatcatgacagttcgtgacgaagacaaaccggaggcagtagagatcggacgcagatttgagaagatcggataccgtatctttgcgacaaagagtacagcagaagcgctgaacgcagcaggtgtgaaagcgattccggtccgtaagatcgagcaggaatcaccaaaccttctggatctcatcttaggacatgagatcgatctggtcattgacattccggcacagggagcagagcactccagagacggatttgtcattcgaagaaatgcaatcgagacaggagttaatgtactgacagcaattgatactgcagaagcattgatcacaagtcttgaaaatacagatattaagaaactgacactgatcgatattgcgacagtacagtagagaaaaaatggtcgggacgagagttccgaccatttttggttataaaacagaacccaacatttggatatgtttttccaacattactttctggtagtttccgttgaatcctctataataaaaatagaacaaaagaggagaagcagaaatatgagtatttgttatcacgaaggatcccaagaatttcatctttacaacaaaaaaatcagctatcttatcaccattttaaaaaatggacagttagggcagttgtattttggaaaaaaactacatgacagggagaatttttcgcatcttctggagctgtgccatcgcccgatggctgtatgtacctatgaagaggattccacattttcgatggagcatatcaaacaggaatatccatcttatggagccggggacatgcggtatccggcagtggagattttgcaggagaatggaagtcggattacggatttcgtgtatcagacccatcggatttacgatggaaaaccatctcttgcaggactgcctgctacctatacggaagatttaaaagaggcacagacactggaaatcgaattgaaagatcatttgatcgataccacattgatcttgtattatacaatctttgaggagcttccagtgatcacaagaagtgcaaaggtgatttatcatggaacaggtaagatcgtgctggagcgggcgatgagctgcagtgtagatctgccggatcacgactatcaaatgatcgggctgaccggagcatggggaagagaacgtgcagtgacagagagaaaactgcagtatgggattcagggcatttacagtatgcgcggatgcagcagcagtaatttcaatccatttctggcactgcggcgggagaatactacagaagcgagtggggaagtgtatggcttcagccttgtctacagtggaaattttctggcgcaggcagaggtggatacatacgatgtcacaagagtgacgctgggaattcatccggaccggttttcctgggagatgaaaaacggagatgagtttcagacaccggaggcggtgatggtctattctgatcgcggacttaacgggatgagtcaggcattccatagtctgtatcgtgcacgcctggcaagaggatactggagagaccggccgagaccgattctcatcaacaactgggaagcgacttattttgatttcaatgaggaaaagattcttcagatcgtacgcacggcgaaacggcttggaatcgaattgtttgtactggatgacggatggttcggaaaacgggaggatgatcattcttcccttggcgactggtatccgaatctggagaaactgcccgatggcattgcgggaattgcgaagaaggcagaggcagaagggatgaaattcggtctttggtttgagccggaaatggtaagcaaagacagcaatctttatagagaacatccggactggatcctgtctactccgggacgtcctatttcccatggaagaaatcagtatattctggatttttccagagcagaggtggtggatgccatttatgaacaaatggaaaaaattctggaggatgcgccgatttcttatatcaaatgggatatgaaccgctgtatgtcagaagtatactctcatacagccggagcagcagaacagggaaaggttatgcatcagtatattttgggtgtttatcggttatacgagaaactgactgccggatttccggaggttttgtttgaatcctgcgcaagcggcggttcccgttttgatccagggatgctgtattatgcgccgcaggcgtgggcatcggatgacacggatgcagtggaacgttgtaagatccagtatggaacgtccctggtctatccggtgagcagtatgggatctcacgtatccgcagtgccgaatcatcaggtgcttcgcaacacatctttgaaaatgcgtgcggatgtggcatattttggaactttcggatatgagctgaatccgaacagcctgacagaggcggaacaggagcagatcaaaaaacagacagcatttatgaagaaatatagaagcttgattcagtatggaacattctaccgccttcggagtccgtttgcaggaaatgaaatggcatggatggtcgtatccggggacaaaaaagaagcacttgtcggctggtatcgttttctggagccagtgaatatcggatatcgcagacttgtactacagggtctggatccagaacagcagtatcagatttcagggtggaaaacagaactgtatggagatgaactgatgcaggcagggctgatcgtatcagatgcggcatccggacaaaatcaggaccagtataacggagagaatggagattttcaatcccgtctttatctgttgaaagcaaaggaaagataaaaaatcctgtcgaagtggcatatatgctactttggcaggatttttttctgtttccgatattcagaaggactcaatccattcaccttacggaacgccttggaaaaagaaaagctattggaatatccgcaggaacaggcaatattctgaatggaaagactgctggactgtagtaattcttcagactttgtaatgcgataccgggtgagaaactgctgtggggaaagctgcacggtttttagaaacagttctgtcagataactccggttcagtgacagataatctgcaatttcctgtacggtgagtggattctggtaatttttatgaatataggaaatcgcctgattgatatacacactggaggtgttctgttgtggggaaatggtacatccagcctcctccaccagaagggcgagaaactgcatcagaagtccctgaatgtaaaattcatttgaggtacttaaggcgtggtgcttcatcatatccagaatataggatttggcagtgtcaatctgtgtacaggaaaaaacaggatgtctgacagacaggcctgcaagacgcagatatttttcggcatcatgaccgccgatgccaacccagagataactccagggatttacggaatccgcctgataaaaagtcagcttgccaggatgaatgagaaacccctgtccctgcttgatcggatagcgttcttccccggagtaaaacacgccttctccttccagacagagatgaagcaggtagcagtcccggactgccggcccgaaagaataagagggagtacagtcctgcatcccgcaaaagaccgtgtaaatgtctgagaagatactgtgataaatgtcggattgtgaataagaggacatagaggactcctttcgtgtgaatgtctgtatcccggaaggttctattgagtactgtggatcatcgtgttatcaaaagcgatcaaatctttgagatcaaaaagagttaacacggttatttcctacaagcagtttatcatgtttagagatctctgacaacttatataaccatgtattatcctacagtctgtatggtatcagagtaccggagcgtaaagataaaccaaaagcttcttgcggctggaatcaaaattacatataatagaagtaattgataaaaagaaacgttcaatggcagaaaaagatacatggaggaatcagatatgagttttcaaatttacaattggctggaaaaatatgtgcatgaagtggtgagtacatttggataccgcatctggtttattggagtgcagggcagttacgccagaggagaagctacagaggacagcgatattgatattgtattgattttagatacgcttcttccggcagatttgaggatttacagaggaatgctcaatcgtttgccatatcgggagaaaatctgtgggtttatttccggacgggaagagttagaaaattggtcaaaagcagatctctttcaattctgccaggatacgatgccgctaaaaggaagcctggacgggattgtagcaaaattagatatgaaagatgtgagacgtgcggttcatacaggagcctgcaatctgtatcatgcggtatgtcataatatgatccatgagcagagccgggaagtactgatggaattatataagacatctgtatttacgatccaggcggaatattttttaaagaccgggaattatctgagaagaaaagcagaattgtttcccaagttgaatggacttgatcgggaaatcttatatattgcgatagagatgaagcagaaaagtggaaaagtaaaaggaagttttgatgaactttctgaaaaactgattctgtggtccagtgatctgattcgcaagtatccggaagaaaatgaatgaatacataaagattttttcaaaaacaagcttgttttagcgaaaatatgcgataaaaaatagaaaattgcaagaaaggattgacgaaacatcaaaaagtcgatagaataacaaccagtgataaaagaattggaggaatcttgcaatggcggcgtataaggatttgacgaaggaagaattattggaattgaaaaatgggcttcaggctcagtttcaggaagtaaaagctaaaggattgaaattggatatgtccagaggaaaaccggcggcagcacaactgaatctttcaatggaaatgttgaatatattgaacagcggaacagaattggtttgtgaagatggtgtagattgcagaaactacggcgggttggatggaatcgcagaggcaaagcagcttcttgcagatatgatggaagttccaaaggacaatgtgatcgtgtttggaaattccagtctgaatgtcatgtatgatacggtagcacgtgccatgacacatggaatcatgggaagtactccatggtgcaggcttgataaagtaaaatttttatgtccggttccaggttatgacagacattttgcgattacagaacattttggaattgagatgatcaatattccgatgacaccaaccggaccggatatggatttggtagaaaaactggtcagtgaagacgaggcgatcaaaggaatctggtgtgtaccgaaatattccaatccgcagggaattacttattccgatgagaccgtataccgttttgcaaacttaaaaccggcagcgaaagatttccgcattttctgggacaatgcatattgcgtacatcatctgtacgaagaaaagcaggattatctgattgagattttgatggagtgtaaaaaggcaggaaatcaggatatggtatacaagttttcctctacttcaaagatcagttttccaggatccggtatcgcagccattgcagcttctgatgcaaaccttgcagatatccgccatatgatgaaagtgcagacgattggacatgataaagtaaaccagctgcgccatgtgagattttttaaagatattcatggaatcgtggagcatatgaaaaagcatgcagatatcatgagaccaaaatttgagacggttttaaatacactggagcgcgaattgggaggtcttgagattggttcctggatttcaccacacggaggatactttatttctttcgatgcaatggaaggatgtgcaaaagcaattgttgccaaagcaaaagaggcaggacttgtgatgacagaggcaggagctacattcccatatggaaaggatccaaaagacagtaatatccgtattgctccatcttatccgacaccggaagagctggcagttgctgcggagatttttgtgctgagtgtgaaattggtcagcattgataaattattgggaaatttataaattctttagaagttaaaaactgcaaaacctcagaatttattgtaaaatagattctggggttttcgttgtattatgagaaaaagagacaggagaaagaaaacatgttatcgaaatttagtgtaaaaaagccatacacagttgtggtcggcatcgtgttgattctgattttgggaattgtatcctttcagaatatgacagcagatcttctgcccaatatgaatctgccgtatgcagcggtgatgacaacatatccgggagcaagtcccgaagaagtggaagcatctgtgacacggcctattgagcagtccatggcaacggtgagcagtatccagcaggtgcagtcggtttctcaggagaatgtttccatggtcattctggaattcggtcaggaggcagatatggattccgtgacactggagatgcgtgaaaaactggatcagatcaaaggatactggccggaagaggtggccaatcctgtggtggtgaagatgaatccgaccatgctgccgatcatggtatcagcagtcagtgcagagggagaaaacagcgcagatgcaagccggacgattacagaaaaggtactgccggaattggaaagtattgagggtgttgcgtctgtgacaacttctggtaccgtagaggaaaagatagaagttgtgctgcagccggaaaagatcaggcagatcaatgacaggattcaggagcaggtgaaccaacaggttacacaggcaaaagcagcgctggatacggcaaaggcacaggtagaaagtggaaaagctgcgctggaagcagggacttctgaggcggcatcccaaatggggcaggcagaagcagagttggcgagaaagagtgcacagatcagtcaggcacagctggagatccaggagaagctgagtgaactgaacctggcagaaacgcagattggtcaggcacagatgcaattggaagtaaaattgcaggaattaaaagcacagaagcaggcattacaagccctggcggaccacacagacaaagagtcacttcaggcagaatatgatcagctgtgtgcccggatagaagaacttcagaatacaggacaggaaattccagcagaaatgcaggcgaaaaaagttctgatggaaaagcagctggatgcattgaataaattttcagaatatatgacagcgttgcaggagcagatttcccagttggaggcaaagaaggcagaactggcagactcacttgcgcagatccggtctggaaagcagctgatggagcagacaaagacacagcttgcagcagggcagatcggtcttgccgaagtacagggacagattagttctgcacaggtagaggcattcagtaaattggcagaaggaagctctgcactggcagcaggagaaagtatggtacagctgcaggaacagcagttgaatcaggctcaggaggagatctcagaaaatgcagacgtatcttccatgttgacagcagatatgatccagactcttctggctgcacagaattttaatatgccggcaggctatgtagaagaacatgggattcgttatctgatccgagtaggagataagatccgttcgctggaagatttaaagaatttaacactattggacacagaaggaatggatccgattcgtctgtcagatgtggcagatatacagacagcagacaattctggttcctcttatgcgaaaatcaatggaaaaaacgggattcttctaagcattcaaaaacaaacaggatattctaccggagaagtcagtgaccgattattagaaaaaatggaatctctggaaaaagaatatgaaggaatccagtgtgtgactttgatggatcagggcgtctatatagacatggtcatcaattcggttctgcagaacctggtttttggagccgttttggcagtgttgatccttcttgtatttttgaagaattatcgtccgacactgatcattgcatgctctattccaatcagtattctaactgcgattgttttgatgtatttcagcggggtgacactgaatattatttcactttccggacttgcactgggtgtgggaatgctggtagacaattccatcgtggtgatcgagaatatttacagaatgcgcaacgaagaacaggcatctgcgaaaacagcagccattgaaggagcaaaacaggtggccggagcaattagcgcttctacactgacaacggtgtgtgtttttttgccaatcgtatttacaaaagggattacaagacagctgtttatagatatgggtctgacgatcggatattctctgggagccagtcttgtggttgcgttgacagtcgtaccgatgatgtcagccgggcttttgaagaggatagagaccaaagaaagcagcctgtttgtgagggtaaaaaaagaatatgtaacactattatctttcgcactgcgaaaaaaaggtctggttctgaccggagtacttttactgcttgcattaagcggaatagcggcattgtcaagaggaacggagtttatgccaacgatggagagcacacagatgagcatgacagtggagaccgagaaaggcactagtctggaagatacggcagctgtcgcggatcgtgtgacagaaaaaatagaaacgatcaaagatgtacgggacattggtgcgatgatttccggacagagtatcaccggtatgggaggcgattccaagaatcaggtgcaatattacatcctaacagaagaaaaacggacactttccgatcaggagttaaagaaggagattttaaaagcaacaaaagatcttccgtgtgccgtcaacatcagtcagtcaggaatggatatgagttcgcttggcacatccggaatttccatagaaattaagggaaaagaactggatcgcttgcaggagatggcaaagaaaacagcagaaatcgtaaaaggggtaaaaggaaccaaaaatgtatcggatggaatggaagatacgaccggggaattacgtgtattggtaaacaaagaaaaagcagcggcatataatctcaccgttgctcaggtgtatcaggaacttgccggtgaagtagcagaagcctcttcgaaaacaacactttccacagaagacagcgactatgatatttatgtttcagatgctgaaaatacaacaaagacaagaaaggatatacaggagttgatcctgcatgtggaaatgcaggacggtaccaccaaagatgttccgctgaaagaaatcgcagattttgaagaagcagaaggattgcaggcagtaagccgaaaagatcagtcccggtatatgaatgtgacagcggaattagaagagggagaaaatatcgggctggtaagcagaagagtggaaaaagctttgaaaaaactggatattcccaatggatatgaagtcagaatggcaggagaagatgaaacgatcagagagtctatgacggagttgatgaagatgctcggactggcagtaatcttcatgtatttgattatggtagcacagtttcagtctctgcgttccccgttcatcattatgtttacgattccgctggcatttaccggagggctgctgggcttgtttttgacaggcaaggcagtcagtgttattgcaatgattggttttgttatgctttccggaattattgtgaataacggtattgtgtttgtagactacacgaatcagttgatggaagatggtatggagaagcaggaggctctgatagaagcaggaaaaacgagactacgtccgatcattatgacagctttgactacaattttagggcttcttaccatggcgtttggtatgggaatgggagcagacatgattcagccgatggcaattgtgacgattggcggtcttttatatggaacgattctgaccatgtttgttgtaccatgtatttatgatctgtttgtgagagaaaagaaatcaaaataaaaacagaagaaaaaaagagaatttcagattcctgtaaccgggaatgaaattctcttttttcttctaaaaattacttctttttggtatgttttttcggaagtgtaaatccttttccatggacttcgtttacttttccgatgatcataaatgcagcagggtcaatctccatcacaagttggttgagtctggaaagttcacggttggaaatgacggtcagaatcatatcctgcttggaatggaggtagccggtttcggtgtggaccagtgtggaaccacgatccattttctgaatgatcgcttcattgatctcatctgatttctgactgatgatcttgacctgtgtctgagcctggccgatgaccaggattttatccagtacgatggtgtaggtcatcacaagaagaattccgtagagaatggcttctttgtcacaaaaaagtgcctgcccgatcaggatcagaaagtcgaacacataaagcattacagaaacaggaagtccgaattttttattcaggatcagtggagggatgtccatacctccagtagacgctccggcacggatgacgattccaagagaaaatccgataaaaagtccgccgaaaatactggacaaaagccggtcatctgtaattccggacagtgcaggcatattttggaaaaatccaagtgcgaccggatagtaaaaagtgctgatcagcgtagtaagtgcgaaatcgattccaagtatgagtgcacctaacaaaaacatgatgcaattaaagatcagtacaaaaacagaaatcggcagatccagatagtgatctataatcaacgagagtcctgtggttccgccggtcatcagttgattgggaagaacaaacatgacgattccaagtgccattgtagtgttccccagaaaaatcataaaaagatttttgggtttaaaaatattggttttcatggttttgatattctcctttgaaataattatgcgttaaggtactatggtaaagcgtaaaaaaacaggctgtgcatcagcctgtatgtcacttctataaaattgaaaaagagatgctgttcgatctttcatttgcgttcgcttctttcctgaatttccgaagaacagtatagcataagttcaggggaaaatacaagtcagaaaacagcgttcatacagatggtcggtataggaggaaagcaggtgcgatgtgttatcgaaaaaaccgataatagagtagttacttttagaaagatgaggtataatagaagaaatggaaaagggggaatggtgtgaacatcaatttcaaacagatggaagcgttttgtgcattggtagaatataaaaattttaccagggcatcacaggcattgtttttaagtcagtctacgatcagcagtcatatccatgcactggaaaaagaaaccggagttcagctggcagaacggaattatcgaaaaaaagtagagatcaccccggaaggagagaaggtttatcaatatgcttctaagatcttgaagctctgcagagagctggaacaggaattttccggagaaaaccatgcaattctggcagctgcgtctacaatcccggcccagtatattttaccaaggctcatggcaaaatttttaaaagaaaattttaatattcgtttttccgttgaaaaaggagacagcacgacagtgcaggaactgcttcggcaaaagaaagtacgcattggatttttgggaacaaaagaaaaggatgaggatttggaatatcaggtatactgcagggattatctggtatttgtaactccgaatcatgaaaaatacagacagtggcaaaaacagaaaaagctggggagagatctgctgacagaacctttgattttgcgtacccagacatcgggtacgatgaaggaattgaaccgatatctaaaagaaaagaaaattgcggaagagaatctgcatattgttgcaaggatcaatgatccagaaacgatcaagagtgcggtgatcaatggaatcggagcaacggtcatgtcgaatctggcagtgaaagacgaggtggaagaggggaggatgctaaagttcgaattggatgaacagagattcagccgatttatctacactgcatggctgaaagaaacagaactgacggaactagaaaaacgttttatagaaccgatggaaagggaagagtttacgcagtagagaagaatgatcggttatgtcgataagaaagagaaaagacggcgggaaaatgaattggaatcctgtataaaagacaggtatactggaaagaaaaggcacgaggagaaggaacatggaactgattcaaaatttacccgaagtatttgaaaaatttgcagagcagagaaaacaatcgtttctggcagtcaaaaagctaaaagaaaatggaactccgatcgtaggggtattttgcacatatcttccgcaggaaatggtacttgcagcaggagcagcaccggttgggctgtgttcgatgtcagatgaaacgatcggagaagcggagcgagtgcttccgcgtaacctgtgtccgttgatcaaatccagttacggattcgctgcaacagacaaatgtccgtttttttatttctcagatttgatcataggagagaccacatgtgacggcaagaaaaaaatgtatgagtatcttgaaaagatcaaaccggtttttgttatggaacttccaaattctcagagtgaaagtggaatgaaactctggaaggaagagatgtttcgcctgaaacatgttctggaagaaaaactggatgtgaccattaccgaagagaaactgcgtgaggcagtccacataaaaaatgaagagagaagtgcgttaaaagagctttcttatctgatgacagcagatccggctccgatgcttgggcaggatatgtttaaagtgttgtatggggcttcttataaatttgacaagcgtgagagtattcgtgagattcaggtggtcactgcacagatcaaaaaggaataccatgaaggaaagatgttagaaaagcgtccgcgtatcctggtgaccggatcgccaatgggtggtgctgctgaaaaagtagtccgtgcgatcgaagcaaacggggcagttgttgtctgttttgaatgctgcagcggaatgaaagcaattgataccaatgtagacgagagcaatccggatgtttatgaggctctggcggaaaaatatctgagcattggatgttcctgtatgtctcccaatccaaaccggtttgaactgcttggaagactgatcgatgaatttaaagtggatgctgttgtggatatggtactgcaggcttgtcatacatacaatgtagagacatatggcgtgaaacagtttgtcaatcaggaaaaagaaattccatatatgagtgtggaaacggattattctcagagtgatctgggacagttgaatacaagaatggcagcatttattgaaatgttgtaggaaaggagtgcacgatgtttgcattgggaatcgattcgggttcttccatgacaaaaggagtgttgtttgacgggaaagacgttgtgaagaaatgtatgattcctacttcggcaatgccgaaaaaaagcatatatcagatttacgagacgttgattccggaaggggaatgttttaccgtgacaacaggatatgggagagatttgcttgtagaagcagacaagtctcttacggagatcacctgccatgcaagaggagcggcgtttttatatccgaatgtacggtgtctgatcgacatcggcggacaggactgtaaagtgattctgctggatcgggatcatcatgtgattgattttttgatgaatgataagtgtgcagcagggacaggtcgttttatcgagatgatgatgcgtacgctggaacttccacaggaggtattgaataccgggttaaaggaggcagatccggtacatatgaacagtatgtgtacggtatttgcggaaagcgagatggtcagtcttctggcagaaggaaaacgagcagaagatattgcgttgggtgcgattgaatctatctgcagaagaacggtacattttgcgagaaggttgtctttggaggaagatatctatttctcaggagggcttgccgggtacccggtttttcaaaatatgctggaacgagaattaaatcttccgattttgacccatgaattgtcacagtatacaggggcacttggagcagcggtgatcggatggcagaaagggaggaagaaggatagatgagtgaacaagaacagatcgtattctgcaaaggaggaggatgtacggcgaagctggggccgggagttcttgcaagggtattggaaaaaatcccgaaaacctgggatgaaaatctgatgatcggctatgacagctcagatgatgcggccgtgtataaactgacggatgacctggcagtggtacagacactggatttttttccgccgatggtggatgatccatatatttttggtcagattgcagcagccaatgcgctgagtgatatttatgcaatgggcggagatgtcaggacagcattaaacattgtatgctttccggaaagctgggacttgaatattttaggacagattatgctgggaggcggagagaaagtcaaagaggcgggaggggttctggcaggtggtcattccattgcagatactgacgtgaaatatggattgtctgtgatgggaacgattcatccggataaggtgtttgcaaacaatggctgccaggttggagatgttttgattctgacaaaaccacttggcgtaggaatcgtgtgtacggcaaaccggatcaaagaggcgtcaaaagaggcaatggatcaggcaatacgttctatgactacgctaaacaaatatgcatcggaaacggtgagaaagtatcgcgtacacggatgtaccgatgtgacaggatttggatttttgggacatttatccgagatgctgggagatggacattctgccagaattaaaagtggtcagattccttatattgcacaggcatatgactatgcaggggagttttatctgacagcagcagcacagagaaaccggaatcatgtgggaaatgcagtgcagtttgaacaggttccgtttgagatggaagagattttatttgatccgcagacatccggaggacttttggtcagtatggaaagacaagatgcggatgcctgtctggaagatttgaaaagactgggacttccatgtggaatcgtaggagaagttctggaaaagagagaaaagaaaatatatgtagagtagaggtgtgaagtcatgaagtatacagtagatgcaagaggaaaacaatgtccaatcccggttgtagagacaaaaaaggtattggcacagatgacagagaaagatgaagtggagactctggtagacaatgagattgctgtgcagaatctggaaaagatggcacgtcagaaacaacttgtgttccgacatgagaaaatagattctcatacatataaagttgcgattacaggaggaagccttgaagccgcaaaagacacaacagagacggaatgtattccgtgtcatgtatcttccggaaaatcaggagaaacggttgttgtgctttcctctgataaaatgggagagggagatgaaacgcttggaaaagctctgatgaaaggttttgtttatgcccttaccagtcaggaagaactgccgtcggcagtcattctgtataatggaggagcaaagctttctgtagagggctcggattctctggaagatctgaaacttctggaatctcagggggtggagattttgacgtgtggaacgtgcctgaatcattacggtctgacagaaaagctttctgtgggaagtgttacgaatatgtatgtgatctgtgaaaaaatgatgcaggcagagaaggttgtgaagccatgatttaccttgacagtgcggcaaccagctattatcgcccaaaagaagttgcacaggcagtatacgatgcgattttgacaatgggaaatgccggcagaggaagtcatgcgtccagtctgaacagcgcacgaatgatttatgagacgagagttttgttgaatgaattgtttcacggaccaggaccagagcaggtcgtatttacctgcaattctacagaagcgctcaatatggcaatccagggaatggcagcaccgggagtgcggatggcggcaactgcaatggatcacaatagtgtgttacgtcccatgtatctggcggaacaaaagggatgcagtcttcagattgtggatgtggacgaaaaaggaaatcttctgttggatcgattagaagcagtctttcaaagcggagtcgatgtatttgcctgtacacatgcatccaatgtaaccgggaatctgaatccattagaaaaaatcggaaagctgtgcaaaaaatacggggtaagatttatactggatgcttctcagactgcgggggtgtttccaatcgacatggaaaaaaatcagattgatattctctgttttacaggtcacaaagggctgctgggacctcagggaaccggtggaatgatccttcaaaaagcaatacatcttccagtgtttaaaacagggggaagcggtgtgcagagctttttaaaaactcagccgcaggagatgccgactgctttggaagcaggaactttgaatgggcatggaattgcaggactgcatgcagcattgacgtatattcaaaaaattggaacagaaacaattcaacggatagaatgtcagagaatgcagcaattttatgaaggagtaaaagaattggatccgataaagctttatggagacttttcaagtatagagcgtgcaccgattgtggccctgaatattggagattacgattcttcggcagtcagtgacgagctttcggaagtatatggaattcagacgcgtccgggggctcactgtgcgcctctgatgcatcaggcatttcacaccggggagcaggggatcgtgagattcagtttttcacattttctcagtgaagaacaggtggacaagagtatacaggcaattcgggaaatgatagcggagggagcatgatgagaccaaaagaattgcgtatcgtagtgacatttgaaacaacaacagctgctatggcatttgaaaatgaggcgggaaagagaaaagtcctgggaagactgattccggttccaagagagatcaccgctggatgtggtctgagtttttctgcaccgatagaagcaaaagaacagattcgagaattgacagagcagctgacatatgatcgaatatacgaactggtaatataaaaaagaagcagacaagtcatttttgatatgcttgcctgcttcttttctctgtcagaaaaatctgatggaaaaagatcattcagccggaggtgtggttgtaccagtatcaccgccggagttattggaattgttgtctccgttttcagaatttccctgattttccgaatcttcggaatcttctttgtcttcggaatcttctttgtccttgtctttgtctttctcgtcgtcttctttttcttcataatggccggaacagctctgtgtaggtccggttccttttgcaaagtattctgtataagacggacagctgctgacagccagaagtccgctggtagaacatacagttttctgttctacagaggtcggcatggtaaagtttttgacctgaagaccaagtgtactgttgacgcggtccataatatttttccagatcaattcatgccatgtctggttgtagatattttccatcggcttgctggaatcatatccgccccagacagagcaggtataatacggtgtgtaagcagcgagccagaggtcagtgctaaattcagaagtaccggtcttaccggatgcaggcattccgtttgcaagctgtgccgttgtaccggtaccacgtttgataacatcctgcatggcattggtcagaagagctgctgtggaatcttttacgacctgatgtgtctctggagtgctgttatccagaatgacattgccatcatgatccaaaacttttgtatataagatcggttttgtgtatacgccattgttggccagtgcagcataggcggctgtcagttcaatgttgtaaacaccgttcgtaataccaccgagtgcagtagactggttatagtcgttatgtgccggattttcttctttgctgaccagtgtggaaaagccgaagttatccagatacttcataccggtatcaatcccgatatctgtcaatgtccgtacggcacagacattcatagagtgcaggattgcatagcggacagtagcctgtccaatatagatgccatcccagttattgatcggagttccgtcattgtaagtatatggggagtcttcgatcagggtggaaagtgtatattttccggtatcgatcgccggtgcatacaccccgagcggcttgaagcaggaacccggctggcggtgagaatctgtggcacggttcagagagaagctggctgtcttttcaccacggcctcctacgattgctttgacttcaccggtatactgatccatgacaacaacagaagtctgtggctgtggtggaatggtaatgctctcggttattgcgtctccttcctgaatgttgagtgtcgatttatattcggcaacggcctgattggcttcttccggagaagaaaaatcaagaggatactggcgtccccatgcggccttaatatattctgcgacatcgttgtggtcataattttcaacggatccattcgcccgtgtaaccgttaatgcatattgcagaccatattcaatcagatatggatagttgttcggattggcaacctcttcatcgcaaatctgctggatcgtcggatcctgtgtcgcataaatagtcaggcctccactgtatagcagattgtgtgcctgtgttgcagtgtaagatttgcggtcctgcagatcttttaaaacctgttcggcaagttcatcaataaagtacgtatttggtttttctgcgtcggaaccgactgcagtaggctggatccggtcatagacgggatctgcttttgcttcatcaaattcctgttgggtaatatatccctgcttgagcatattgccgagaacgaagtcccgacgttttgcgttttcttccggattgttcacaggatcatatctggtaggattctgtgtaataccggcaataacggtacattctgacagggacagttctgatacgtctttgttgaagtagcgtttggcagcagattgtacaccgagacagttctgtccaaggttgattgtattcatgtacgcttcgagaatttcttctttggacatttgtttttcaatttccagtgccaggtactgctcctgcagttttcgttccagactgtcataaaatgttttttcctctgtaaaattcggaaatacgttatttttgatcagctgttgagtgagtgtactggctccttctgaaaaatctccgcttgtaatgcctacgaccccggctcttaagatcccctgcaggtcaattccattgtgttcgtagaaacgctcgtcttcaatggctacaaacgcattggcaagatgttttggaatcttatcaatcgttttgtaggtacggttggatcctgcttctcggaattgtcccagattctgtccggtagatgccgcaaccacctgagatttatatccgctgggcttgacgctggaaggagtaatctcaggtgcattgtcaatgattttcttgaccaaaaagccaccacctgcggccccgatgatgcagatgagaaggaaacagatcacaacggccttaaagacacggactccgacccgtttctttttcatatttttctttgaagatacattttttttcttcttcgaaaggctttcttttccgtaattcatgaataatatcctcctttattcattctactcattatatcaaatttgctcttttaaagcaaaggaaaaagaaaaagttcatattcttataaaaaaattttaagaattgtatcgtttttcttgtgtttatttcaaaggcgtagtatatataattgagagtggcagtcagtatgtatttgccacagatcagggtatgaaacgacaagggggaagcagatggaatacaggacaatatatcagggcggtaaagcagaaattgtggaaaaaaagtcccgctttattgcagaagtttttctcgtacactcagaagaagaggctatgcagtatctggaacagacccgaaaaaaatactgggatgcgagacatcactgctgggcgtatgtaatcggagaagagcgtgtgacagagcggtgcagtgatgacggagaaccgagcggtacggcaggaaaaccgattttggaagtcatccggggagaggcgcttcaaaatgtgcttgtggtagtaacgaggtactttggagggacacttttggggactggcggactggttcgtgcatatacggaatcggcaaaagcaggaatttcccacagtcagattattaccaaaatgtacgggtttaaactgaatcttacaacagattatacaggattgggaaaaattcagtatcttttgggacagagaggattgacaattttagagagtgcgtacacggaaaaagtagatctgacggttttgattccaaaagaagaggaaccacgattgattgcagaaatcacagaagctacgaatgggcagactgagatttccaggacaggagagtgctggtttgccaatgtagcgggagagatgatcgtatttgaataaaaagataacagaaaagctgtcggttaccatggaaccgacagcttttccgctgttttatcttatgagaattctggttcgatcaagccgaaggaaccatcttttcttttgtaaacaacattgacttcatctgtctctgcattgcagaatacgaagaaagcatgtccaagaagatccatctggatgcaggcatcttccggatacataggcttgatgccaaaccgttttgtgcggacaatgcgaatctcatcatctacagaatcatcatcttctgattcgaaaaattcttttttaaagttattgccggaaccggaagcggtagggtgtccctgacttctggcaaccagtttgtttttatatttgcgaagctgtctttcaataacttcttctacaagatcaacggatacatacatatcatcgctggtctgctcagagcggataatgtttccttttacaggaatggttacttcaatcttctgacgttctttttccacactgagtgttacgataatttctgtttcaggagtgaaatacctttcaagttttcctaatttctgttcaatagcgtcttttaaacctggtgtcacatcgatgttttttccactaataataaagttcatactggtcaactccttttgtttatattgtacaaataacgactttttttgaaagtgtctttgtactatgtaaacattataacacggaaatcccttattgtatagaacgaattacttcaattcgagtaatttttccatcggtgatctttgcgatccgcagtccaaaatcagaaaagtaagtacaggcaccgactccaatctcaatttcatcttcctgcattttcttcaacaggacatcaagcagtgtttcatcgttctcataaggaatatgaacgtggatcagacgattgatgtgtttgactttttgcgacgaacggaaaataattttttccgattcgtcgaatgtcataaatagaaactttcttgtagcaaacagggttgcaatggcaatcacgccgatcagactgttgattggagaaccatgttcaatgatgatctgtcttgcaatcgcaaaaagcaatacttcaaacactgtgatcggagtgtggagatacaacatgcgtatcatctccacaccgatgatcagattaaaacaggtggtcagcatatcatcataatttggatactgattcaaatccgacaaatgcggaaaagaaagaagcagttgaaaagtcatgatgatgatcgtgacagcaaggatcagagcaatgacaacttccaggatggaagtaacccatttcaaaaaggcattggcatattttttcatggctgactcctgattattttaaattgctgcgttttcgcattcttgaatccagaatttttttacggatacgcaaagtctccggtgttacttccagaagctcgtcggtatcgataaagtccagcgcttcctccagacttaaaacgcgcggaggtgttagacggagtgcttcatctgcactggaagagcgggtgttggtcagatgcttggtcttgcagacatttaattcgatgtcttcggcttttccgttctgtccgatgaccattccggcatagactttttctccaggtccgataaacaaagtaccacgttcctgtgcgctgtagagaccgtaagtaacagattcaccggtctcaaatgcaatcagagaaccctgtttccgatattgaatgtcccctttatatggagcatatccgttgaagctggtattgagaattccgtttccttttgtatcggtcataaattctccacggtatccgatgagtccgcgggcaggaatcagaaattcaagtcttgtatagccaccgccggaaactcccatattctgaagttctccttttctctggcttaatttgtcgatgactgttccggtaaattcttccggtacgtctacataggcaagttccattggttctaattttttgccgttttcatcggtatggtacaatacttcggccttgcttactgcaaattcatatccctcacggcgcatattttcaatcaggacagacagatggagttctcctcgtccggagactttaaagctgtccgcattttctgtttcttctacacggaggctgacatccgtgttcagttcgcgcatcagacggtcgcgcagatggcgggaggtgacgaattttccttctcttccggcaaatgggctgtcattgacgatgaactgcatagaaatcgtaggctctgaaatcttctggaacggaatggcttccggcttctcaggagcacagagtgtgtctccgatggaaatatcggaaataccggaaattgccacgatggaaccaatcgtagcttctttcacctctactttgttcagaccgtcaaattcatacagcttgctgattttgactttctgctgtttatcagggtcatggtggttcaaaagaaccatatcctggttgacacggatggttccgttgtccacttttccaacaccgatccgtccgacgtattcattataatcaatggtactaatcagcatctgtgtcggtgcttccgggtctccttccggagccgggatgtattctaagatcgtttcaaataacggctgcatatctttttcttcatcagaaaggtcgagtacggcgattcctgatttggcagaagcataaacaaaggggcagtccagctgttcatcggaagcgtccagttccatgaaaagttccagaatttcatcgatcacttcatccggacgtgcttccggacgatcgatcttgttgatgcagacaatgacaggaagatccagttccagtgcttttctcagtacgaattttgtctgtggcatagcgccttcaaaggcatccactacaaggatgacaccattgaccattttcagaacacgctctacttcaccgccgaagtccgcatgtccgggtgtatcgatgatattgatttttgttcccttgtaataaacagcggtatttttagagaggatcgtgattccacgctctctttcaatatcattggaatccatgacacgttccgcaacatcctgattctcacggaaaacaccactttgttttaagagctcatcaaccagagttgtttttccatggtcaacatgagcgataatggcaatatttctaacatcttcacgttttgttttcataattttacactctttcttacttatgttaatgtgtgttctcttgttacaactttttcattctatcataaatttcagattttacaagtactgttgtaatcggggaataaaaaaattgtcggtagattttgtcgaacggtttttcggacaggcaggtctaaactgcggtatgatgtcatagacttaagttgactcaaaaatataaaataccacatagaggaagggagtactacaaattatgtcagataagattattgaaaacaatcaggttacgatcatgggagttattgcatccgggtttacatacagccacgaggtgttcggtgaaggattttatatggcagatgtgctggtgaagcgtctgagtaattccaatgaccggatcccgctcatgatttcagaacgtctgatcgatgtgacgcaggattatacaggagaggcgattaaagtatctggccagttccgttcgtataaccgccatgaagaacagaaaaaccggctggtgctgtctgtgtttgtgagagaagtggaatttatagacgaggaactggatggagctaaaaccaatcatattttgctggaaggctatatctgcaaaaaaccggtatatagaaaaacgccgcttggaagggagattgcagatctgcttctggctgtaaatcgtccttatgggaaatccgattatattccgtgtatctgctggggaagaaatgcgcggtatgcgtcaggattcgaggtgggtgaacatgtgcagattctgggaagaatccaaagcagggattatgtgaagagaatttcagagacggaaacacagacaagaaccgcttacgaagtgtcagtaagcaaactggagtgtatggaataaggtgcttttccgcttcctgacgttgacatcacttctgaataatgataaaatttcataaacattactgagtaaagaatcgataaggtcaggaggataaatatgtcaatttttacaggagcaggagttgcaattattacaccgtttcatgcagatggaagtgtgaattatgagaagctggatgaattgatccagtttcattgtgataacggcacagacagtattgtgatctgtggtacaacaggagagtcatctaccttgacggaagaagagcacatggactgcatcaaattcacgatccagcagacaaagggacggattccggtgatcgcaggaacaggttccaactgtacaagaactgcaattgaaatgtcaagtgaagcagccaagagcggtgcagatggtgtacttcttgtgaccccatattataacaaagcaacacagaacggactgatcgctcactataaggcaattgctgcagagacaaaagcaccgatcattttgtacagtgtggcaagcagaaccggagtgaatatagaaccatctacagtggcaacactggtaaaagaaacagagaacattgtggcagtaaaagaagcgtcaggaaatatttcacaggtagcaaagattctgcaactgacagacggcaatgtagacgtatattccggcaatgatgatcagatcgtaccgatcctgtcattgggcggaaagggtgtgatttctgtactttccaatgttgcaccgagagagactcatgacatctgtgcaagcttctttgcaggagatattgccggcagccgtgcattacagttgaaagcactgccattgatcgaagcgctgttctgtgaagtgaatccaatcccggtgaaaaaagcagtgaatctgatgggaatggaagttggcggacttcgtatgccgctgacagagttgagtgaagagcatactgcacagctgaagaaggcaatgcaggagtttggaattcagttagcataaaaatattttgttaaaaggatatcatagattgagcaaactgccaggatgtgatatccttttttatataccttaccggacgaagtccgcccgccggaggcaagggttacgggatacccggagggaatactatgaaagaataacgttttcaggtgaaatgtgaaagatacagaacgaggaggatattaggatgacaaaagtaatcatgcatggctgcaatgggagaatgggacaggtgatcacagggattgtggcagcagacaacaagatagagatcgtggcaggcgtggatcagtttcagggaattcaaaatacatacccggtgtttgattctattgagcagtgtgatgtagaggcagatgtggtgattgatttttcgaatgcggcagctgtggatggacttctggattattgtgtgagcagacatctcccggttgtactttgcacaaccggactttcggatacacaattggaaaaagtggagcaggcagcagagcagacggcagttttaaagtcggcgaatatgtctatgggcatcaatttgctgatgaaattattaaaagatgctgcaaaagtgcttgcaccggcaggatacgatatggaactggttgagcgtcatcacaatcagaaggtagatgctccaagcggcactgcacttgcacttgcagattctgtcaatgaggcgctgaatcatgagtatacatatgtatatgacagaagtcagtaccgtcagaaaagaaaggaaaaggaaattggaatttcagcggttcgcggtggaacgatcgtcggcgaacatgaagtgatctttgcgggaatggatgaggtgattgaatttaagcataccgcatattccagaagtgtgtttggaaaaggagcagtggaagcggcgaagtttttggcaggaaaagaaaacggtatgtatgacatgagtgatgtgattcagttttaatcagtattgatacgagagcggggagcggtatgaaagaattagaaacaagatatctggagagactgtcagatttgtatcctacaattgcggcagcctctacagagatcatcaatctgcaggcaattttgaatcttccaaaagggacggaacattttctgacagatattcatggtgaatgggaagcgttttcccatgtgttaaaaaacggatccggtgcagtacgaagcaaaattgaggatgtgtttggatatacactggggaaatatgagaagcaggagctggcaacactgatctactatccgaaagaaaagatggagcaggtcaagaagacagaaaccaatatggaagactggtataaaatccatctgtatcggctgattgaagtaagtaagcgggcagccagcaaatatacgcgttcaaaagttcgcaaggcgcttccaaaggattttgcttatgtgattgaagaactgatcacggaaaaggcagaacttcatgataaagagtcctattataatgaaattattcagacgatcatccgtattgggagagcagaagaatttatctgtgcgattgcggatctgatccagagacttgtgatcgatcacttacatatcgtaggtgatatttatgacagaggaccgggaccacatatcattatggataagttgatgacctatcattcggtagacattcaatgggggaatcacgatgtgctctggatgggagcagcagccggacagagagggtgtattgctaatgtcattcggatttgtgcacgttatgggaatcttgacattttggaagacgggtatggaatcaaccttctgccgctggcgaattttgccctgcggacttatggagaggatccgtgcacctgtttccggttaaaaggaaatgatcggccggggaaagcagagatggagatgaatctgcgaatgcacaaagcaatttctgtgatgcagtttaagatggaaggaaaactgatcctgcagcatcctgaatttcagatggaagatcgtgcacttttacatcggattgactatgagagaggtacgattctgttaaacggaacagaatatccgctgaaagactgtagttttccgacgattgatccgtccaacccgtatgaattgacggaagaggaagaagagatcatggatcgactggaaaaagcatttgaaggttgtgaaaagctgcaggcacatatgcgttttcttcttacaaaaggtggattgtataaagtatataacaacaatctgctgtatcatggatgtgttccgctgcaagaaaacggagaattgaaagaagtacaggtctgtggaaacagctatcgtggaaagagtctgtatgatgcattggaaggctatgtaagaaaaggcttttttgcactggatgagaaggaaaaagaacagggaaaaaatattatgtggtgtatctggcagcacccggattctccgctgtttggcaaagacaaaatggctacatttgaacgttattttattgatgcaaaagaaacccatctggagaagaaaaatccatattatgagtttttggaaaaagaggaaattgtggatcggatcttggaagagtttgggcttcggccggagggtgctcatatcgtaaatggtcatgttccggtaaagtgtaaaaacggagaaagcccgattaagtgtaacggcaaggtcctggtcattgacggagggttttccaaagcatatcagaaggagaccggaattgcaggatataccttgatctataattcctatggtctggtgctggtggcacacgaaccgtttgaatcaaaagaggccgcggtagaaaagggaagtgatatccactcggattatatggtagtaaagcgagttatggaccgccgttttgtgggagataccgatgtcggcactgagctgaaggaacaggtggcagatttggagatgctgcttgcggcttatagaagtggtcaggtagtcgaaaagatataaggaaaggcatgaatatatgagcaaagagttagaagaggaattgttggaggaagaactggatctgggagttgaaatggaagattttgctcaggattcggtagatatgacggagccgttaaagatttatttgaaagagatcggccagattccattgcttacagcagcagaagaactggaactgggacgacgtatcgcagagggagatgtggaagcacagcggaagatggaagaggcaaacttacgtctggttgttgcagtggcaaaacattatgtcggaaaaggcatgcagtttatggatctgatccaggagggaaatatcggtctgatgcgtgcagtcgaaaaatttgattatacaaaaggcagcaagttttctacttatgcggtgtggtggatcaaagaggcaattttacgggcattggattctcagtccagagaaatccgtgtgccggtccgggttgcgcagaatatgaataagatcagtaagacagagcgaaagatgcagcagacacttggccgggacgtggctccggaggagattgcaaaagaacttcatatgacgacagaagaagtagaacgcatgcagagttatattaaaaatccagtatctcttgagacgccggttggggatgaagaagacagcagtctggaagactttattgaagatacaaaagagccgactccggaggaggctgttgctgcattggtacaaaaggaagaagttcaagagctcctttccacgttgtcagaaaaagaacagaaaatattgcggcttcgctatggtctggaagatggcaatgtacatacattggaagagaccggtcagctgctcggggtgacgagagaacgaatccgtcagctagaatccagagcattggaaaaactgagaaaatcagcggggtcaagatcataaaaaagaaaaaaattccattcataaaatatgaaaaaaaggaaatcttaacagtgtaagacgatattttatgaaaggaagaagattatgaaaaacagaaaaaaactgcttgtattactgatgtgtacctgtatgcttctgggaacaacggcatgtggaaacacaaaagatacacaggataatacaacaatgaatgatgcaactgacaacacaaaagatacaacagataagaccgacagaaatgaaaatcgtaccgatgacaaaagtaatggaaaagcggacgacgtggtagatgatatgacggacggagtgaacgatgtggtagatggtgtgacggatggagtagatgatctgacaaaaggagctacagatgcagtggatgatgctgcagacgggatgacaaaagatcaggatacacagaatcgggagaacaaccgatagttttggaataccggataaatgagtgctgcagaagtgttttttgcagcacttttctataccatataggagtgtttttgtacggcacatcttccatgagagggcgctgttcataataggaaaggagactgatcatgaaattcagaccctgtattgatatacataatggaaaagtaaaacagattgtaggcggcagtttgagagatcaaggagatatggcacagaccaattttatttcggagcagactgctgcatggtatgcagaaagatataaacaagacgggctgaaaggcggacacatcatcctgttgaactccagagattctcaatattttgaggcaaccagagagcaggcagtccaggcactttcggcatatccgaaggggatgcagatcggaggaggcattaccgcagcaaatgcagaagaatatctggatgcaggagccagtcatgtaatcgtgacgtcttatgtatttcgagaagggcaggtggaccgcagtcgtctcaaacaattaaaagaaacagtggggaaggaacatctggtattggatctgagttgtcgtaaaaaggaagacggatattacattgtgacggatcgctggcagaattttacaaaagagcggctttcagaagaactgctggatgagatggcacagtattgcgatgaatttctggtacatggagtagacgtagaaggaaaagcggcaggaatcgagagtgatcttgtgaaacttctgggaaactggagaaagattccaatcacctatgcaggagggatcggaagtttgaaagaattggaaaaattcagaaatctggggcaggaaaaactggattttacaattggaagtgcgctggacttgttcggtggaacgataccttatacaagtctgatccgtttgtaaatgaaatgtaaacaaacagaaacaagcacatgaattggttgaattcatggaaagttagtgctaaaatggtaggcagagtaaatttagacaaggagcagattacagattatgggtttaatggataagattttcgggactcacagccagcatgagctgaagagaatttatccgatcgtggatcgaatcgaggcactggagccagagatgaaggcactttcggatgcggaattaaaagataagacaagagaattcaaagagcgtttaaaggagggggaaacgctggatgatattcttcctgaagcgtatgcagttgtaagagaaggcgcatacagaagtttgggaatgcgtcattatcgtgtgcagttgatcggtggtatcatcctgcatcagggacgtattgcagagatgcgtaccggtgaaggtaagacactggtttctacattgccggcatatttaaatgcacttacaggaaaaggggtacacatcgtcacagtaaatgactatctggcaaagcgtgatgctgaatggatggggaaggtacatgagtttcttggcctgacagttggtgtggttctcaatgatatggacaatgatgagcgccgtgctgcctataattgtgacattacatatgtgacaaacaatgaactcgggtttgattatctgagagacaatatggtgatctacaaggagcagcttgtacaaagaggactgcattttgcagtgatcgatgaggttgactctgttttgatcgatgaggccagaactccgctgatcatttccggtcagagcaataaatcaacaaaattgtatgaggcgtgtgacattctggcgcgtcagttggaaagaggagaagcaagcggtgaattttccaagatcaatgcgatcatgggagaggacattgaggaatcaggggactttattgtcaatgagaaggaaaaagtggtcaacctgacagaagacggtgtgaagaaggtagagaatttcttccatattgaaaacctggcagatccggaaaatctggagatccagcataacatcattctggcattgcgagcacacaatctgatgttccgtgatcaggattatgtggtgactccggaaggagaggttatgatcgtcgatgagtttaccggacgtatcatgccgggaagacggtattcggatggtctgcatcaggcaatcgaagcgaaagaacatgtcaaagtcagaagagagagcaagactctggcaacgatcacattccagaacctgttcaataaatatgaaaagaaaagtggtatgacaggtactgcactcacagaagaaaaggaattccgagatatttatggaatggatgtggtggagatcccgaccaatcgtcctgtgcagagaaaagacctggaagatgccgtatataagaccaaaaaggaaaaatatcatgcagttgtggaagcagtcaaagaggcgcatgctgcaggacagccggtacttgttggtacgatcacgatcgaagtttcagaattgctcagcaaaatgttgaaaaaagaaggaattcagcacaaagtgttaaatgccaaatatcatgagatggaagcggagatcgtcgcagatgcaggacagcatggtgccgtgacaattgcaacgaatatggccggacgtggtacggatatcaaactggatgatgcagcaagagaagcaggcggactgaagatcatcggtacagaacgacatgaatcaagacgtattgataaccagttgcgcggacgttccggacgacagggagatcctggcgaatccagattttatatttctctggaggatgatctgatgcgtttatttggttcagagcgtctgatgagtgtattcaatgcacttggagtagaagatggagagcagattgagcataagatgttgtccagtgcgattgaaaaagcgcagaagaagatagagggaaataacttcggaatccgtaagaacctgctggaatatgaccaggttatgaatgagcagagagaaatcatttatgaggagagacggcgtgttctggatggagaaagtatgcgcgatacaatctacaatatgatcacagaatatgtagagaatatgacagaccgttttgcggcgccggatgcggacgaggaaaactgggatgtatctggtcttgagcgtactctccatggcgagattccaatgttgaagatgccagaggcagacgcagtcaaaggaatgagtcagaaagaactcaagcatacattgaaagaacgggctgtaaaagcatatgaggaaaaagaagcagaatttccagaagcagagcagttgcgtgaaatggaacgagttgtacttctgaaagcaattgatacacgctggatggatcatattgacgatatggatcagctccgtcagggaattggtctgcaggcatacggacagagagatcctctgatcgagtataagatgatgggatatgatatgtttggcgagatgaccgattctatcgcagagacaacgatccgtactttgttccatatccgaatcgaacagaaagtagaaagagagcaggtggcacaggcgaccggaacaaataaagatgacagcgcatcacatactccgaaaaaacgggaagagaaaaaaatctatccaaatgatccatgcccgtgtggaagtgggaaaaaatataaacagtgctgtggaagaaaataaaaacggcagaaagaggttgttgactgtgtgtatactgcattagacattgcgctgcaatatatacacagtcaatgtgatttcatattagatttttgaaaaaagaaagaggtgatcaaggtggttttattagatgaactgaaagcaaaattgcttgcatatgaagagccgctgaaagatttgagggattcactttgacttagcgtcaaagaaagaaagaattgaagagctggaaagaacgatcgaagagccgggcttctgggatgatccggaacactcacgacagatcatgcagttgttaaaaggattgcaggattcggtgaagcagatcgagcagatgtttgcagactatgaagatatcggattattgatcgagatgagccaggaagaacaggatgaagagacggtacaggagattgaagaagagctgctgcgttttgaaagcgagtttgaagcgcttcggatccagacacttctgaccggagagtacgacagagacaatgcgattgttacgcttcatgccggggcaggcgggactgagtcctgtgactgggcaaatatgctttacagaatgtataccagatgggcggaaaagaaaggattttccgtagaggtgctggattatctggaaggggatgttgccggaataaagggtgttacttttgaagtcaaaggagagaatgcatacgggtatctgcgctctgaaaaaggagtgcacaggctggttcgaatctccccgtttaatgcggcaggaaagcggcagacatcgtttgcatcctgtgatgtgatcccggatattgaggaagatattgacattgagatcaatgacgatgatatccggatcgatacgtatcgatccagtggggcaggaggacagcacatcaataagacatcgtcagcaatccgtattactcattttccgacagggattgtagtacagtgtcagaatgaacgttctcagcatatgaataaagacaaggcaatgcagatgctcaaagcaaagctgtatctgatgaagcagcaggaacaggcagacaaagtatcggggattcgtggagaaatcaaagaaatcgggttcggaagtcagatccgttcttatgtcatgcagccatatacattggtgaaagaccatcggacgaatatggagatcagcaatgtaaatagtgtgatggatggaaatctggatccgtttatcaatgcatatttaagtatgccaaagggcaaagaagaataaaaacacgataaaagaacaggaaggaaggcgaatatggtaaatatagcagttatgggatatggcacagtaggatccggtgtcattgaagtattacagactaacaaggaacgaatcgaccagagagccggggatgagatctatgtgaaatatattttggatctgagagattttccgggggatccgattcaagagaagattatccacgactttcaggtgatcgcagaagatccttccattcagattgtggtagaagtgatgggaggaatagagccggcatatacttttgtaaagcaatgcctgatggcaggaaaaagcgtggtgacatccaataaggcacttgtggcaaagcatggtgcagaattactttctattgcaagagagaaaaatatcaattttctgtttgaagcaagtgtcggaggcggaattccgatcattcggccgttaaattcttcgatgacagcagatgagatcgaagagattacaggaattttgaacggaacgaccaattatatgctcagtaagatgttttacgaaggtgcagattatgaggaagttttaaaagaggcacaggaaaaaggatatgcggaacggaatccggaagctgatgtggaaggatatgatgcctgcagaaaaatcgcaattctttcttcgctgatttccggacagcaggtagattttgaggatatttataccgaaggaatcacgcagatcacaaaggaagatatgttatatgcgaaggcgatgggaatgacgatcaaactgctggcctgcagcaggcgggatgaagatcatattcatgcgatcgtagccccctatctgttgagcgcatctcatcctctttacagtgtgaatgatgtgttcaatgcgatttttgtacatggaaatgtgcttggtgatgcaatgttttatggaagcggtgcaggaaaacttccgaccgcaagtgcggttgtttccgatatcgtggatgaagtcaaacatttgaatcggaacatcatgaccatgtgggatcagaaaaaagtagaactgcttccgattgcagatacaagcaagcgtttctttgtaagaatcaaaggggatccgcaggctatgagagcacatctggaaagcaaatttggaccaatcgagatcgtacaggcagaacaactggagggagaattcggatttttaacagaagttatgacagaaggtcgttttgaacagtgtcaaaaagaatttccgtctattctccatcgaattcgtgtagaggggtgaagtgcgtatgaaatatgtagtagtattatgcgatggaatggcagatgagccgttggaagaattgggtgggatgacacctctggaggctgctcacactccaaatctggaccgtctggcacagatttctgaaattggaatggtgcagactgtgccggagggcatggctccgggaagcgatacggccaatctttctgtgatcggatatgacccaaaggaatattataccggacgctctcctctggaagcattgagtatcggggtggatatggcacctacagatgtctcttttcgctgcaatctggtgactttgtcagaagaagaggaacggtatgaagaaaagcatattttggatcacagttccagtgagatcagtacagaagatgcgaatattttgatggagactttgatgcaggagatgcgaagaggcggatatgaattttataccggaacgagctatcggcatctgttgatccataaatttggaaacattgttgaactgacagcaccacatgatattctgacaaagcggattggagaatatcttcctcaggatccggtgcttcgggagatgatggagaccagttatcgaattttaagcagtcatccattgaacctggaaagaaaagcaaaggggctcaatccggccaattcggtatggttttggggtgcgggaacaagaccgatgctgacttcttttgaagaaaagtaccagaaaaaaggcgctatgatctctgcagtggatctgttaaagggaattgccgtaggtgcagggcttgataatatcatcgtagaaggtgccaatggcggtctgcatacaaactataaagggaaggcagaagcggcagtagatgcactggctgcacaggaatatgattttgtttatgtacacatcgaagcacctgacgagatgggacatcagggaagtattccggataagataaaagccattgaaaatatcgatcagatgatcatcggaccggtggtcggagaattggaagatctttgcatggatttcagaatgctggtgcttccggatcatccaacgccgattcgtgtgcgtacacatacaggaaatccggtgccatatcttttgtatgattccagaaaaaaagcagaaggtatgccggagtattccgaaagactgggtgcaaagagtccgtactttgaaaaagaaggacatcggttattgtccaggctttttgagaggaacgatgaacggtaagacagagaggaagaaaaaatgctgatagtaaaaaaatttggcggcagttcggtcgcagataaagaatgtatttttcgcgtggcagagcgctgtgcggaagactatagaaatggacatgacgtgatcattgtcctttcagcgatgggagatacaacggatgatctgatcgcaaaagcgaaagagatcaatccaaacccatctaagagagaactggatatgctgctgacaacgggggagcagatttctgtttctttgatggcaatggcatttcataagcttggagttccggcagtatctctgaatgcatttcaggtaaagatgcacagtacatctacctatggaaatgcaagatttaaaaaagtagaatccgagagaatccttcatgaactggggtatcgcaaaattgtgatcgtcacagggttccagggggtcaataaatatgaagattatgcaacgatgggacgcggaggctctgatacgacagcagttgcaatcgcagcagctttgggagcagatgcatgtgagatttatacagatgtagatggagtatatactgcagatccaagaatcgttccttctgcaagaaaattaaaagaaatcagttatgatgagatgcaggagctggcctccatgggggcaaatgttttgcataaccgttccgtggaaatggcaaaaaaatatggagtgcagctggttgtgcgctcaagcatgaacagagaagaaggtacggtagtcaaggaggtagtaaaagtggaaaaattgttaatcagcggagttgcatccgataaaaatacagcgagaatctctgtgatcggaattgaagataagccgggaacagcgttcaagatctttaatacacttgccaagaagaatatcaatgtagacattattctccaatcagtgggaagagagggaacaaaagatatttcctttactgtagctgaggatgacctgaaagatgcacttgcgattctggaagaaaataaagaagcgctgacgattcaggaaatcaattaccaggaaaatgtggcgaagatttctattgtcggagcaggaatgatgagcaatccgggtgttgccgctaaaatgtttgaggcattgacaaatgcgagagttaatattcatatgatttctacttcggaggttcgaattacagtgctgatcaatgaaaatgatgtagaacgagcaatcaacgcagttcacgagagatttggactgggagaataaaaaaatccaatcagacgttcatggatgtctgattggattttccttttttacaataattttttcaacagcagccgatcttccggagtcatcgcacgataaccctggatcagttttacttcttcccgggtcagatagagcgtatctgcagtgtcgatctccatggcatgtgtaaatggccctttttgctccaaaatcaatccatcttttgtacagggatgattgaccagctggtcaagagaaacaccgtagatgtcagccagatggatcagagaatccagatccggtgtccgtttgctggtttcataatttgaataagcctgtctggaaatgttgagcaagtcactgatctcttgctgagtgtagtgatgtgctttacgaagacggcataaattttcaacaagctgaatgttagacattgctgtacctccatttacagggaaatgttaaaagcttaataaattataacaactttccctataaatagatatctatgcgacaaaacgtagcgaaagaacaaaaagacacaaaaagtggaatttgtaaaactttacatatctgacggaaaatatgacctcagagtttgctgagtgtgctgttgtgataggaggaagagaaggtaacgtcttcaccgaaccatgtgggcgcgacaaagtgattggccgtttcttcatccggaaattctacctcggccagcataagtggtgcaagatctcctgaaaaaagatcaagttcgataacgagtgaatctttgagaggaatcacatatcttttttttgtgatcaatcgaccgtcaattttttcttttaaatgttcgtaggattctttggtaagggggagattgtattcttcccgaaccatcattcctttggacttataagtcagaatgtagtcctcgttgtccctgcggatacggatcacaggttcagtggaaagatatccttgttcgattttatggcaaggataggcctgaagatcaaaaggaacatcagaaatcagatattttcgttcaatttccatgaaaaaactccttttcatataatagtttgttatagagtatcataatatgaaaaacagaaaatgtaaacgggcaggcattgcatttttcagagggatttgctacactttttaccatatacacataaaagaaatattggaatttgaacaggaggagcgtgtcatgaaacaggttgcggtatttttggcagatgggtttgaagagatcgaaggtcttacggttacggatttgctgcgcagggcaggtgttgaggtgaaaaatgtatccgttacgggagaaaaaatggtgcagggagctcatggaatccgggtagaggcggatgtattatttgaagatatggatttttcgcagacagatatgcttgtgctgccgggaggaatgccgggaacgattcatctgaaggaacacacagagctgtgcgtactgctgaaagaattttacgcaaaagagcgtgatctggcagcaatctgtgcagcgcctacggtatttggtgaacttggatttctggaaggaagaaaagcatgctgttatccgggaatggaagacggactggggaaagcagaagcaaatgaagaacaagtcaatgtggacggacatatcattaccagcagagggctggggacagcaattccattcgcattaaagctgattgagcgtttgtgtggaaaggaaaaggcgaaagaaatcggtcatggagtagtttattcttaaaaagtactggaaatattgcaatgactatgctatactatttcaatgactgcgaatatacaatttgcgtttgaatggtacgaatcaaggaggaaatagaaagatgagtttacaggtagaaaagttagagcataatatggcaaaacttacagtagaagtagcagcagaagacgtagaaaaagcactgcaggcagcttacttaaaacagcgcaaacagatcaacattccgggattccgtaaaggaaaagttccgcgccagatgatcgaaaaaatgtatggaccggaagtattttatgatgaggcagtaaacagcatgattccagacgcatatgcaaaagcatacgaggaaagtgaactggatattgtttcacagccaaaaatcgacgttgtacagatagaaaaaggaaaatcattcattttcacagcagaagttgctacaaaaccggaagtgacactgggagactacaaaggtctgaaagtagacaaagtatctacaagagtgacacagaaggaagtagatgaggaaatcgagaaagagcgtgaacgcaatgcgagaacaatcgaagtgacagatcgcgcagttcaggacaaagatgaagtgacattggattttgaaggatttgttgacggtgttgcatttgaaggcggaaaaggagaagattatccgctgacaatcggttccggagctttcattccaggatttgaggagcagctgatcggagctgagattgacaaagaagtagaagtaaatgtaacattcccggatgagtatcactcagaagaacttgccggaaaagatgctacatttaagtgtactgtacacacaatcaaagcaaaagaacttccagagctggatgatgaatttgcatccgatgtttctgagtgcgagacaatggacgcttacagagcagaagtgaagaaaaacatcaaagagcgcaaagaaagaactggaaaagagaagaaagagaaccaggcagtagatcaggcaatcgagaatgcgcagatggatattccggaagcaatgatcgagacacaggtaagacagatggcagatgatatggcacgtcgcatccagcagcagggactgactgtagagcagtacttccagtttacaggaatgacagcagagaagatgcttgaagagatgagaccacaggcagaaaagagcatcaagacaagacttgttctggaagcgatcgtaaaagctgagaatatcgaagtttctgatgagcgtgtggatgaagaactcacaaagatggcagaagcatatcagatggaagttgaaaaactcaaagagtttatgggagaaaacgagaagaaacagatcaaagaggatcttgcagttcaggatgcgatcactcttcttgtaaacgaatctgtagaggcgtaagctgttttggcagattctgccaaaagtccacagtgagagggggccgcaggtagcggcagattaagtcagcataataaggaggaaaagcaaatgagtttagtaccttatgttattgaacagacaagccgtggagagcgctcttacgacatttattcaagactgttaaaagaaagaattattttccttggagaagaagtaaacgatgtatctgcgagtgtgatcgtagcacagcttcttttcctggaagcagatgatccgaataaggacatccagttatacatcaacagcccgggaggttccgtgacagcgggacttgcgatttacgatacaatgcagtacatcaaatgtgatgtttctacagtatgtatcggtatggcggcaagtatgggagcattccttctttccggcggagcgaagggaaaacgttttgcacttccaaacgcagaaattatgattcatcagccatccggcggagcacagggacaggcaactgagatttcgatcgcagcagagcatatcctgaagactcgccagaaattgaatgagatcatggcagcgaatacaggtcagcctctggagacgatcaaggcggatacagaacgtgataacttcatgtctgcggaagaagcaaaagcatatggattaatagatgaggtaattgccaaacactagtgctgtgggaggcaatatgaggtgaagagtgatatggcaggaaaagcaagtgatgatatggtaagatgctccttctgtaataagccgcagtctcaggtcagaaaactgatcgcagggccaaatggagcctatatctgcgatgagtgtattgaggtttgctcggagattatagaggaagagtttgagtacgatgatgacagaagagaatttgatgatatcaatcttttgacaccagaggagatcaaggcattccttgatgaatatgtgatcggacaggatgaagcaaagaaagttctttctgttgctgtatacaatcattacaagcggatcatggcaggttctgatctgggcgtagatctgcagaagagcaatattctgatgttgggaccgaccggatgtggaaagactctgcttgcccagacgctcgcaaagatattaaatgttccgtttgccattgcagatgcgacagctctgacagaggccggatacgtgggagaagatgtagaaagtattcttctgaaagtgatccaggcagcagatggcgatatcgaacgtgcagagcatggtattatctatattgatgaaatcgataagattacaagaaagtctgagaatccgtccattacaagagatgtgtcaggagaaggcgttcagcaggcgcttctgaaaattatcgagggaacggttgcatccgttccgccacagggaggaaggaagcatccacatcaggaattgatccagatagatacaacaaatatcctgtttatctgtgggggtgcatttgaaggaatcgataagattattgagaccagactggataagaagtccatcggttttaatgcacagattgcagagaagcatgaggaagatgttgatgtattgctgcatcaggtacttccacaggatttggtgaagtttggcttgattccggaactggtaggacgtgttcctgtcacagtatctctggatcttctggataaggaggcactgattcgaattctgacagagccgaagagttctcttgtaaaacagtatcagaagctgatggaacttgacggcgtgaagttggagtttgaaaaagcagcgttggatgtgattgcagagacatcccttgcaaggaaaacaggtgccagaggattgagagccattatggaagatattatgatggacacgatgttccgtgtaccatcggatgataccattaaaggttgtatgattacaaaagatgttgtggaaggaaagggacagccattgtatgagtgcgatggagaggaaagaaaatcttttctgacatctgaaagtgcatagataacacaggcgggtgcatagggaggaccatgtacccgcttgttttgactttggagaaaacaaaaagcaggaggaaaatacaggtgaacagagaaataaagagccttccggcggtagctctgcggggaatgacgatcatgcccgagatggttgttcattttgatgtgagcagagaaaaatcagttgcagcgatacaggaagctatggcaggagatcagaagatctttcttgtggcacaaaaatcaatcgaaacagatgatccggcccaggaagatgtgtatgaagtcggaacagttggaacgatcaagcagattatgaagcttccaaagcatattgttcgtgtgcttgtttccggagagacaagaggcgtattaagaaactttgaacaggaggcaccatatctgagggcagaagtggaagtgatcgatgaatcagaactttccattccggatgatttaaatggagaggcaatggcccgtggattgaaagatacttttctggagtatgctgcgcgcaatggaaaaatgtcaaaagagtcggtggcagaaattctggagatcaaagatctgaaaaaactggtagatgagattgctgcaaatacgcctttttattatgtcgatcaacaagaaattctctctaaaatagaatttggagaacgatatgagacattggcctttaaactggtgaatgaagtgcagatcatggatattaaggaggaactgcagcagaaagtaaaagagcgtgtagataaacaccagaaagaatatattcttcgagagcagttaaaactgatccgtgaagaattgggagatgactcgactttgtctgatgcggaagaatttgaaaaggcagcagtgaatctaaaagctccaaaagaagtgaaggaaaaactgaaaaaagaaatccggagatttaaaagctctttgaacagtccggcagaaagtggtgtgatcaggacatacattgagacactgttggagatgccctgggataaagcgggaaaagataatcaggatatcaaatatgcagagacagtgctggaagaggatcactatggtctggaacaggtcaaggagcggattttagaatttttggcagttcgttctctgaccaaaaaaggggagagtccgattctgtgtcttgtgggacctccggggactggaaagacatccattgcaagatctctggcaaaagccctgaaaaagcaatatgtgaggatctcactgggaggtgtacgtgatgaagctgaaattcgggggcacagaaagacgtatgtgggagcaatgcctggacgtattgcaaatggaatccggcaggcaggtgttaagaatccactgatgcttctggatgaaattgataaagtcagtacagactataagggagatacattttcagcacttctggaggttctggacagtgagcagaattataaattcagagatcattatctggaagttccattggatctgtcagaagtgttatttattgccactgcaaattccctgcagacgattccgcgtcctctcctggatcgtatggaagtaatcgaagtgacaagctacacagaaaatgaaaaacttcacattgcaacagaacatttgattccaaaacagctggaaaaaaacgggttaaaaaaggaacagctgaaaataagtaaaaatgcagtctggaagattgcatccaattatacaaaagaagcaggtgtgcggcagttggagcgggaaatcgggaatatttgcagaaaggcggcaaaagaaattcttacaaccggaaaaaagagtgttacaattacagaaaagaatctgtttaaatatctgggaaaagagaagtttacatatcagatggcaaatgcagcagatgaaatcgggattgtgcgcggactggcatggaccagcgtaggtggagatacacttcagatcgaggtcaatgtaatgccgggaaaaggagaaatcatgcttacaggtcagctcggagatgtgatgaaggaatctgcaagaaccggtatcagctatatccgttccgtaagcagcaagtatcagattgcagaggacttctttgaaaagcatgatattcatgtgcatattccggaaggggcagtgccaaaagacggtccgtctgccggaattacgatggcgacagcaatgctttctgcgattacaggacaaaaagtacatgcggatattgctatgacaggagaagtgactttgcgggggcgtgtgctgccgatcggagggctgaaagaaaaacttctggccgcaaaaaatgccgggatcaaaacagttcttgttccgaaaaagaatgtgccggatgtagaagagctttcccaggaaattacaaaaggacttgagattcttccggtagagcatatggaagaagtgctgcgggcagcatttgtgtcagagcatcaggataaaatatcaggagaggagtaaactatggtaataaagaatatcaatctggaaacagtgtgtgggatcacaagtaaattgccggagaacgacaaaccggaaatcgcgtttgcgggaaagtcgaatgttggaaagtcgtcgctgatcaatgcgctgatgaaccgaaaatcgtatgccaggatttctgctacaccaggaaagacgcagacgatcaacttttataatatcaatgaagaattgtatctggtggaccttccgggatatggatatgcaaaggtttctgaaaaagaaaaaatccagtggggaaatttgattgagcggtaccttcatagttcaaaacagttaaaggccgtgtttcttctgatcgatatccggcatgatccctctgcaaatgataagatgatgtatcagtggattgtggatcagggatttcagcccattatcattgccacaaagctggataaattaaaacgcagccaggtacaaaagcatgtgaagatgctaaagacaggtttaaatttgcttccgggaacgaaagtaatcccattttcttcggttacaaagcagggaagagatgaaatctgggaactggcagagagggagtatctttttccggaacgatttatggaggagacagaagaataggttctgaggcgtgatgtcatatagaaaagcaatgtgcggaaagggagagttttatggaacgaaaaagaccttactggcaagtggcggtaagtctcgtgttcagtatactggcgactgcggcatttatcattttaggagtcaaggcacttggatttttgatgccgtttgtaattggctggatcatttcagcaattgcgacacccctggtaaactggttggaaaagcggctgaagattgtaaaaaaactaggtacggcgatcatagtcatactggttattggactgattgtcttagtgggatattttgcgatcagcagaatcgcagcagaggtgactgacctgattcataattttccggatatttatgcgcagctggaagcgggactgcgggagattggagatacgctgtccggcgcatttggaaaacttccgcagggagtacaaaatggatggacagcgatcgtgcaaaatttggacacttatatgggggatcttgtctccaaaatcagtgagccgacagtaacagcagcggggaattttgcaaaaagacttccatcttatttgatctcattgattgttgccatactggctgcttacttttttacaatcgagagggaagaggtaatcgcatggtttcataaaatcgcaccgccatcggtggaaaagaggatgaccctggtaatggataatttaaaatatgcggtgggcggatattttaaagcacagttcaagattatgggagttgtttttctgattttatttgccggattccttgttttgggaattcattatgcggttctggttgcttttctgatttcatttttagattttcttccattttttggcacaggaaccgcattgattccatgggcaatctattcactttttatcggtgaatataagattacagccggactggcgatcatatatgttgtttcacaggtagtacgccagcttttacagcccaaactggtgggtgacagtatgggaatgaatccgttggtgacgctgttgcttttatataccggatataagatcaagggtgtcttgggaatgatcctggcagtgccgctgggattggttctgatcaatatgtgtcaggcaggagcatttgactatattctggatgatgtgaagattctggtagagggaatattaggactgcgggaagaaattccagaagaggacaaagaaaattcggatcttacttgattccgggaaaaagagtgtttataatatcaacatagagaaaaaggggtgcttgcaaaaagcaggctgagagaaagctgaattgcttaaaacccgtaacctgatttggataatgccaacgtagggatatacagagaaagtgatcagatctgaaaagaaaaattgctgctgtgatgcgtttgcgttgcagcagctttttgctactcctccgcaggcatggaaaggaatggatatgagaaactacacaacacagatggaagctgcaagaaaacagattgtaacaaaagagctggagattgtagcgagaaaggagcagatgactgtagaagaactgctgccgctggtggcagaaggtaaggttgtcatctgtgccaacaaaaaccacacctgcatagatccggaaggagtcggatccatgctgcgaacaaagatcaatgtaaatctgggagtatcaagggactgcaaagattatgaggttgagatgcagaaagtcatgcaggcagtagatatgggggcacatgcgattatggatctttcctctcacggagatacgatcccgtttcgaagaaaattgaccagtgagtgccctgcaatgatcggtacggttccaatctatgattctgtgatccattaccagagagatttggatacgctgactgcgagagattttatagatgtgatacgtcttcatgcacaagatggtgtggactttgtgacactgcactgtggaattacaagaaaaacgatcgggcagatccggcagcataagcgaaaaatgaacattgtatcaagaggaggatcgcttgtgtttgcctggatgtgtatgacaggagaagagaatccattctatgaatattatgacgaaatcctggaaatttgcagagaatatgatgttacgatttctcttggggatgcctgcagaccaggatgccttgcagatgccacagatgtttgtcagatggaagagctgattcggctgggtgagctgacaaagcgtgcatgggagcgggatgtgcaggtgatggtagaaggtccggggcatatgccgctggatcagatcgcagccaatatgaaagtacagcagtccatttgtcagggagcgccgttttatgtattgggaccacttgtgacagacattgctccagggtatgatcatatcacttcggcgattggaggtgcagtggcagcatcagccggagcggcctttttgtgctatgtgacgccggcagagcatctggcacttccgaatctggaagatgtaaaacaggggatcatggcatccaaaattgcagcacatgcggcggatattgcaaaaggagtgcgcggagcaagacagcaggacgaccggatggcagaagccagaagaaatctggcctgggaagcgcaatgggagtgtgcgatggatccggaaactgcaaagcggatctggaatgagagaaagccggaacatgaggatacttgttctatgtgtggaaagttctgtgcggtgcggagtatgaacaaagcactctcgggagaacatattgatattttatagagtcaggtactggatgaccaggcaggatgtggcccgtaaaaaggaaggcatcctgcctgattttgaaagctattttgtcttttccgcgtattcggcagcaagctcatcgaattcttcggtgtgtgttgggtaccaggtgtcaaaagtgctgtctgcagcggcaatttttttaccgagagcaacgagaaattctggaatcacagtttccagaaggacttctttttcgatacccagatgtgatccgggttcttctccgcacccgtttacgaataatttaaaggctggttccatttttccatctacccgtttggaatgtcctacaaaaccgatacttcctgcctgatggcttccgcagctggaaggacatccggaaatatggatgcagggaaggactccgtcagcaaactgctctttgcgaacccgctggatacaggactctaatagtgcataagaattgcggagcccatgctggcagatcggcacaccaatacaactgacactgctttcaaataaagaagcagcaccgtcttttgttgcttctaatacagcaggaacttcctttgcagtcaggttgatgatatacaaggtaccatccggtgagattcgaagctctgtttctggcatctctttgatcacggcatatagttcggccggttttttggattcaagccttcctccaagcggatggtaagaaacggaatacagaccgttttgcttctgtgcgagtactcgtttttctgccagaagatggtcagacagagtgccgtctgcagatttggataccggatgggaaggctctacaggccatggcgtcatttcttttcgtgcatcttctacaaactgaagaaaacagcttcggatcttttcttcgcccagggtatcctgcagatagcgggttctggattttgcgcgtgactcataattgccatatgtggtaaaaagacgaatcatagcatggacataaagggatacttcgcttggatccacattgtctgtaatgtgaacgccaagttttggatttggtcccaatccacctgcacagtaaacggaaaatgttccgttttctcttgctacaaatccaaggtcacggaatgtagcatgtacttcattggcctgggtattggaaaatccgacttttaattttcggggcatatgaagtccgggcatctccgtcagaagatattctcctacagcctgtgcatagggaaatacatcgaatgtctcatccggtgcagtgcctgtcagaggacttgccatgacattacgcgggttgtctccgccgcccccatgtgtgatgatgccgacctttaaggcatcacggataagttgtggaacagagtccacggacaagtcatgaaactgaatggtctggcaggtggtcagcttgagcagggaaatctgatgttctgaaatcttgtctgcaagaaatttcaagtgttcctttgtgatgtgaccgcctggaagccgaaggcgcagcatatatccttgctctttctgtgcataacttccgaagccgccggaaattcctttgaatgtttttcggtcaatttctccgtgttcgaaggcaagtatgttttcctcaaatcttgtgatatcatgttcaaattgttgtaataattcttttgaaagcatggtcaagactcctttctctactacttgataaatttagaaactctgtatctagtataatgaaggaggaacaagagtacaaggggaatcgaaagattgctctcaattttgcagatggagtgagaaaacaggtgaacaaagatagatttctcaatccgctattgctataataaggacaaaacgacaaacaggggaactagatatggatacaattttgatcatagaggatgacgcagatctccgggaaggactggagtatacattgcgcggggaagggtatcagatcctgacagcggaaaatgcagaaaatgggcgaaagctatggaggatatcttccagcgatctgattttgttagactgtaatcttccagatggaaatggcttctcgctgtgcagtgagatccggaaaagcagtgatgtgttcattctgatgctgacggcgagggatacggaactggatgaggtgaaagcactggagatgggagtggatgattacatgtcaaaaccattttcgattgcagtgctgaaagcacggatcaaaaagctgctttccagaaagaataacaaacagtggatcagctccaatggaatccgtttggacaaaagcagctgtcaggcaatttgtgacgataaagtgctggagctgagtaagatcgagtacaaactgcttttgtactttctggaaaatccgggacaggttttgtcaaaggagcagattttagaacgaatctgggatcaggatggaaaatttgtggatgagaatacagtctctgtgaatatccggagactgcgcagaaaaatcgagacagatccgcagaatccacaatggatccagacagttcacggacttggatatatctggagggaagaggagaaatggtagtattatggaactgatcgtaacaggaattctggcagcaggcggtgcagctgggattttgtttgggatatatgagaggcggaaacaaaaaaggctgtatcgcgagacagatcggatgctggagtctgttctggatggaaatccggtttttgtttcagaccttgaagaaggtgaattatctgcgctttcggggaaaatcagtaaaattcaggcaatgcaggagatgtcagtgtctcaggcagaaagggaaaaagaacaggtgaaacgtctgatttccaatctgtcacatcagttgaagaccccacttgctaatatcaggatgtatgaagagcttctgatggaagataatcaggatgcagagactcagaaaaaatttctgacaaaaatgcagatacagagtgagaaattagagtggatcttaaattcgctgtttaaaatggtgaagctggaacagaatgtgattgtctttgaggcttcgatgtgtccaatccgaaagacgattctggaggcggtaaatctggtgtatgaaaaggccgtcagaaagcaggtacagatcaagacagggtatattccggatatgcttgtctatcacaatgcaaaatggacggcggaaattttcgtcaatcttttggaaaatgcagtcaaatatacccgggagggaggacagatccaaatagatctcagacagtatgagatgtatgcagaaatccgaatcacagatacgggaatgggaatccgaaaagaagaaattccccgtatctttcagagattctatcgaagtaaagatgcagagaatctggaaggaagcgggattggactgtatttgtccaggttgattgcagaaaaagaaaaaggatacctgcaggtggaatcggtttatggaaaagggagctgcttttcggtatttttgcggatggaaatatgacaattttgtaagaactttcttttgggatgtaggatttctgtaagatggggctgttatactgatggtatcaaagaaaaggagagcttggagataatgaagattttagaagtacagcatgtggtgaaactctatggttccaatcaaaatcaggtgacggcactttccgatgtcagttttactgcagaacagggtgaatttattgcaatcgtaggaacgagtggttccgggaaaagtaccctgttgaatctgcttggaggtctggatgttccgacagaaggaaggatatgtatcaggggatatgatatcgggagtctgacgagaaaagaacagacaattttcagaagaagaaatatcgggtttgtatttcagaattacagcctgatgccagtgctcaatgtgtatgacaatgtggcattaccgattacttttgacaaagggagccatgtggatcgagagtatatcaggggattattaaacgagctgggattgtgggagaaacggaaacgatatccgagtgagctctccggcggtcagcagcagagagctgcaattgcaagagcacttgcaaacaaacccgcccttctgctcgcagatgaaccgaccgggaatcttgattctaaaactgcggtggaggtaatcggcctgctaaaagccagtagtcagaaataccatcagacggtgctgatggtgacacataatgaagcgttggcacagtcctgtgaccggattatccgaattgaggacggcaggctgtatcagagagaagacgcattttacggggaaggcggtgagctgtaatgaagcatatcatacgtcttgcctggttctatctgaaatattataaaaaacagacgttggctctgtttttcgggattgttttgtcctgtgctttgtttaccggaatcggttcgcttcaaaagagcggaaatcatgcagcaagagaaaatgcccgcacaaaatccggagactggcactacacgatgcgctgtgacacagactggtttgaggcgtttgagaaaacgtatcagacgggagaaaaagagcagggttactgcgtggaaaaaaccggtgtgctgacgatgcgcaaggtgatagaagagccttacgagatcgagctggattacgcagaagaaggttatctttctatgatgggaagaacgctgaaagaaggcagatatccggcagaggaaggagaagcggcgctggatgaatttacacttcggaatctggatattccgcgggaaatcggcacgacatttacattggatggagaaacatttacgttgtgcggaattgtgtcagagcagccgtccgctcttacgcagcggatgcaggtatttgtggatccaacacgggattatggaacaaatggaagatttctgtacgtgaaatttgaggaatccaaagatatttacaggcagatgcgtgcgtttgcagatagatttggaatttccaaaaaggaaattgcggcaaactgggagctggtggaatggctgaaaaatggagcccgtatcaatgcggcagaagcagtgaagaccgggattctccactggaaggaagcaggatttccttatatctgggggaatctggatgaaaagtggaatctgaaggataaagctgtgctggcagcgataggtgtatttggaacatttgtgatctacagtctgttccagatatcagtacggaaaagaatgtcacagtacagtgtcatgcagacactggggatggagccaaaatgtacgtttggtgtgctgacaagcgagttgtggatgatttttgcagtggcttatccggttggatgtgttctcggaaacgcagcagcatgggggatttatcagaaaatcggcagtatttttgtacggacaaagggaattcagcatacgaatatgtacgtcgcagcagaggcggccagagaggctgcacaggcaggacgtgtacaggcgggggcatttcaggtttcaggagagacgattttctttggagcggtctttctgctgtgcctgcttacatttgtaagtttgattttagtgaggcggatggaaatgctgacactacgggaaatgatcacgaaagaagacaaatcacagacaaagaaacggcagatttacagtctgaaacaaaaagatctgacaggtatcctgacaaagaagtttatgttttcaagaaagaaaacttttatcggaatcatattgtctctgtctgtgggaagtgttctttttttaggaactgcctatctgacagaaaatgcaaagatcaacaatgaactgacattcaaggcagatgacggacttggttcggatattcaggtgtatgaagattcagatacactgtccggtctgattccaaaggcatgtgcagagcagatgaaaaagataagcggattggagtctgtcagaccggtgcggtatatggcgggagagcttacgatgtcagatgatgtttttcactggacggagtattatatgggcgacgagaatccgaaggaaaacattctggatgcagatccggatatggtggaaaaattcaatggaagactggtgagaaaagcaaacggagaatatggattgaaggtcaatatctacggatatgatgacaggatgttaaaggagttgaatgactatcttctggagggagaaatcgatctggagaaaatgcgggaagaagatacggtgatactggcaaccttgatggacggacagggaaactatgatggaatcagtgtgtctcctggggatgcgctttcagtaaggacaccgaagactgcgggtacacagacagaattgctgaaatttcagggggaagactcgctgtatcagaattcggatcttcaagtccaggcagttgtcagcagaacactggcaagagtggatcagttttacggggatggagcagccagcattattatgaccaatgaacagatgcagaaatattttggcattgaaggataccggaccatcagcattgcattgaaagaacatgcggatgcggtctcagtgacagatgagatccgtaagattgtttccggagtatctgactgtatcgtcaaggattatacggaacagatcaaggtgcagaacttttatctgaatcagaaaatgctgttcttctatggaattgcacttgtccttctggtgatcagccttctgcatattatgaacagtatgcagtatctggtgacagccagaaagcatgaatttgggattttaagggcgatggggatcacggattccggttttcggattatgctgttcaaagaaggactgcggtatggagtatattccagtattgtgatggtcgtactttatctggcggtacaaaaagtgttgtactattttatgacacatgtatttttgtatctgcatccaaaatcaggtattcagattgtgccggttttgcttatgatcctggtgaacctgggaatctgtgcagcggcagtggtgatttccggacagtctgtgttgaaagaacaggtggtggatgtgatacgggagtagacagagaggaaagcaaatggcacatatatttgaaaaagaatttgcaccacagccgaaggatgatttttatctgcaggattgtgaagaaggggataccgtttggacgactgcacatggtaaaagatcggtatctgtaatcggcggtcagtctggtcctacatccgtttttctggcggggacgatagaatccggtgatcaggtggcgtattcatcccctcattttcatccggtgaaagaaacaacctggaaaccggtattttacaggcaggagcttgaagaaaaatatctgagcatcagattggataaatcgtgtttgaaaccatggtaaaatttcctgaaaaatgacagtccttttcttacgatacagtcaaaacgacaaaatgaaaaaaagaaacttacgaagagaaaaaaatatctttataataaacgaatgtagcagcaatgaaaaaagaagataagaaaaggagaaaaatatgccaaagcataagagagaaagtttgatttatacggtaatgatgtgtttcgtgatggtactctggatgagtgtttacaacgtgacgctgcatatgggacaattcggtgtggagactttaaaggaagcatggcttggcttcccagtggcttatatttttgcgatggtgtttgactggtttgtcgtatcaggtccggccaaagcattcgcattccggtttctggttaaaccggacagcagtgtgcttcaaaaggtgatcgctgtttccagctgcatggtaataccgatggtgatcattatgtcattttacggaggtgtggaagcttgcataaaaagcggagaatggggaagcttacttctgatctggctgaccaatattccaaagaattttattatggcacttccattccagctgttgatcgccggtccgttggtaagaaaagtatttcgaaccgcatttccggagggaaccgtacttttaaaagcaaatatctgaatgtaagcaatatcctatgaaatctatgctgttggcaatttgaattaatatatggaactatgatggtaataaaataacagaggagttacacgaatgaatatcagaaaagcgaaaacagaagatttatcaaggatagctgaaatatatgtatttaacaacagagtaaaatatatgtggattcattttttcagagtcagggagttggtgatgcgctgatccgatatgcgatagaagaatttggtgcagacaatttatgggcattggaaaagaataaaagagcaatttcgttttatcaaaatcatggatttcaagtgacaggtaggaaaagactggaagaagatacaacggaatatcttgtaaaattagaaagataagttttggacagaagcagaaggcgaaatgccttctcttttttaaatgaaaaataaacagtacataacagttgacaacagatatgaactgttatatactgtttacaaataaaggaggcgcatatgaaaattataatcaacagttcatcgatggtaccgatctatgaacagatcgtagaccaggtcaaggcacagattataagcggcgagttgaaagaagatgacaatctgccgtctgtccggactttgtcaaaagaattgaggatcagcgcactgactgtaaaaaaagcatatgattctctggaacaggaaggatttacggttaccatacacggaaagggcacctatgtggctgccgccaacaaagagatgatgatggaagagtatcgcagggaagtggaagaagaattgactgaagtggtacgcaaggcaaaacgatatggtctgccggaagaagatatccgggacatgctgaatctgatattggagggataggatatgctgaagttagaacatgtaaagaagcagtataaaaattttacactggactgttcactggaagtaaagccgggctgtattaccggactgatcgggcagaatggagctggaaagtctacaacatttaaggcagcgcttggattgatccatatggatggaggaacggtccggctgttgggaaagacaggacaaaatgtcaaagaaaaagacaggcaggatctgggggttgtactttcggatgcggggttcagtgaatatttaaaggtacaggatgtgatctctatcatggatgcgatgtatccgaagttcgaaagagaatgttttatatccagatgccaaacgtttcagattccttttgataagaagatcaaagagttttccacaggaatgaaggcaaagttgaaagtgcttctggcattgtcccatgatgctgactttttgatcatggatgagccaacagccggactggatgtagcggcgagagaagatgtgctggatcttctgagggaatatatggaagaaaaggaaaaccgtgcaattttgatcagttctcatatttccagtgacctggaagggctgtgcgatgatctgtatatgatccacgaagggaagatcgtgctgcatgaggatacagatatattacttggaaaatatgcagtactcaaagtagacgaagagcagtatcacacactggataagcagtatatacttcgtcagaaaaagacttcatttggatatgagcttctgacagatcaaaaacagttttatatggaaaattatccaaaggctgtgattgaaaatggtaccattgatgaggcgattttgatgatgatcaagggggaaaaaatatgaagggattattggtaaaagatttttgtattttgaagctgcagaagaatactctgttgatcatactggctatgtgtgttgtatttacggtgtttatgaaaagtccgacctatattgtgaacctgcttccgatgtatggggggctggtagccttaggaacactttcctatgatgagtttgacaggggatattcttttttgtttacgctaccgatatcaaagaagggatacgtaagagagaaatatgtgttcggactgcttctctgtggaggagcctggctgatttctgttttgctcagttccctttacgttttgtttgtggaaagaacggaaatggatgcgtcattattggtggcatatgccgtgccgatcgtacttgttgtttttctgattggaattgcaattccggtacagttaaaatatggaaatgaaagaggaaggcttgcagttgtagcaacaggacttgtaatttttgctgtgataatagcggggggacagcttatgaaatttttaaacttagaagtggaaccagtattggaaacaatatcgcagatgaaaatgtcagtattggttttgctcgttgtggctggcgtcgttttgtttcttggaatttcgtattggatcagcgtgcgggttatggaaaaaaaggaattttagagggaaccttcaaagatgtttagaagatcagatggggcgaatcgcaaaaagcgaccgcctcatttttgcaagaaatctttggaaaaagaaagacattttttagattcaatggtaaaatggtattgtctgatgaaaataatggaatgataacaggaaaggcggagcagtatggatcattttaatttttgtgttggaaccaggattttattcggaagaggacaggaagaaaaattgccggagcttttacaaccatatggaaaaaaagtattgttgacttatggagggggaagtattaagcgtaccggactatatggccgtatcaaagagcttctttctgagtttgaagtatttgaacttggcggaatcgaacccaatccgagaattgagagtgtctgtgcaggggcagagatctgcagagaagaggatattgacgttattcttgcagtgggcggcggaagtacgatcgattgctccaaagcaattgcggcagctgcgtattatgaaggtgatgcatgggatttgatcctgcatccggagtggattgagaaggcgcttccgatctgtacggttctgacactttctgcgaccggaagtgagatggacaatggtggagtgatcacaaatctgaagacaagagaaaagctggggtttggaaatccattgctgcttccaaaggcatctgtactgaatccggaaaatacatttactgtaccggcaagccagacagcagctggaagtgcggatatcatgtctcatattatagaggtgtattttgataccagaaaggcagcagtcccggatcggatcagtgaaggtcttttgaagactgtgatacagtatgctccgattgctgtgtgtgagccggaaaattatgaggcacgtgcagagctgatgtggacttcttcgctggcgatcaacggaatctgttccaccggcaaagattgtgcatggagctgccatccgatggagcacgaactgagtgcctactatgatattacgcatggagtaggtctggcaattctgactccgcgttggatgcggtatattctgaacgacagtacagttcagaagtttgcagagtatgcaaaaaatgtatggggaattgaagagagtgaaaatgtatttgacactgccaatgccggtatcgatgcaacggaggaattcctgaaagggcttggaattccaatgacgttatctgaggtggggatcacagaggagcattttgaagagatggcagagcatgcagtaatatttggaggtctgtcggaagcctatgttccactgaaggcagaggatgtagagaatatttatagaatgtgcctgtagatcgttccataaataaggaggaaatgacaatggagacattgcagctaagagaggatttttactggacaggaattgtagacgatcagcttcgtgtatttgatattattatgtacacggaatttggaacaacatataattcttatattttaaaagcaggagacaagacgatcctgtttgagacagcaaaagaaaagttttttgatgagtacctggaaaaactgagtgagatcacagatatcacaaagattgattatttggtagtcaatcatacagaaccggatcatgcgggaagtgtagaacggcttttggaattgaatccgggattgaagatcattgccacaggatgtgccatcggatttttgaaagaaatcgtaaatggggaatttacggcaattccagtaaaagataatgagacaatgaagatcggaaacaagactcttcgtttcttgatcgtgccgaatctgcactggccggatacgatgtatacttatatcgaagaagaacagattcttgtaacttgtgattcgtttggttcccattatggatttcatgatattttattgagcagggtgacagagtgggatgactatgtacgggctacgaagtactattttgataatattatcggaccattcaaaccattcatggcaaaagcgctggcaagagtccgggagttggatctgagcatgatctgtaccggacatggaccggtcattgatgacaagatttcctggatgctggatacgtatgaagagtggtgtacggtagtgaacccaaatccgaaaaaaacagtgatcattccatatgtaagcgcctatggctatacagcgcagcttgcacagaagatcgcagaagggattcaggcaagcggagatgtggatgtacgctgctatgatatggtagaagcagatcaggcaaaagttctggaagagttgggatttgcagatggaattttattgggaacaccaacgattgtcggagaagcactgaaaccgatctgggatctgacaacctctatttttgcgggaacacatggtggaaagttggcaagtgcctttggaagctatgggtggagcggtgaaggcgttccacatctgatcgagcgtttaaagcagcttcgcatgagggtagtagatggattccgtgtgcgctttaaaccaggggaagagaatctgatcgatgcatttgattatggttataattttggatgtattctccagaataaagaaaataaaaaatcagaaaaaacaggggcgcgtcagcttgtaaaatgtctggtctgcggagagatctttgattcatctctggagatatgtccggtctgcggagttggaaaagaaaattttgttccggtggatgcacaggaaagtgatttctccaatgatacaaaagatttctatgtaattcttggaaacggaactgccggctggaatgcggcaacagaaatccgaaagagaaacaaaacagcatcgattttgatgatttcaaatgaaccatatcgtacctataatcgtccaatgttgacgaaatctattatggcagagttggatgaagagcagattgcagtacagaatgcagaatggtatgaggaacagaatattcagcaggttctggatatggaagttgttgcgatccatccagagacaaaagaaatcgagctggaaggcggtttgaaatttgtatataccaaactgatttatgcattgggagcagaatgttttattccaccgattccaggggcagacaaagaaggtgtcattgcaatccgccgcttggctgatacaaaaaaaatagcaaaaattttgcctggaatagaacacgttgttgtgatcggcggcggtgttctgggattggaagctgcatgggaactgaaaaaggcaggatgccaagtaacggttctggaagctgctgaacagttgatgggacggcagctggatcaaactgctggtgagatgttacagtatatcagtgagcagcagggagtccagatccatacaggtgtcagcattgcatcgctggatggagaagcgaatgtgacaggtgtaacccttgcagatggaaggtcgttcccggcagagctggtgatcgtgtctgcaggagttcgtgccaatactgcattggcacaggaagcaggaatagaagtggatcgtgcagttgttgtcaattctaagatggagactaatgtgccggatatttatgcatgtggtgattgcgcacaatatgaagggtttaattatgcaatctggccggaggcatcggaacagggaaaagtagccggagcgaatgcggcaggagaggcattggaatatcagacagttccggcagcactgagtttccatggaatgcggactgcattgtttgcagccggagataacggaaagaatccgaatctggtgtataagacaatcgagctgaaggatatgggaaagagacaatatcagaaatattactttttgaacaatcgactctgcggagtgatcctgatcggtgatgtaagccgaatggctgagatgacacaggcactggaagaacatgtgcagtatcaggagttaaaactgtaaagcggggaacaaactactcattccttcaaaaaggagtggggatttcaattatacagaagatataacataggaaaccgcaatggaaagtacagaacaaacattcgatttgttctgtacttttattttatattctgatataatagccaaagagaatgaagatgatagattcataggagggatttcatggatcattttgaattagtatcagaatatgctccgacaggagatcagccccaggctatcgaacagcttgtgaaaggattcaaagaaggcaatcaatgccagactttactaggggttactggttccggtaagacatttacgatggcgaacgtcatcgcacaattaaataaaccaacactcatcatcgctcacaacaagactctggcagcacagctatatggggaattcaaagaattcttccccaataatgcggtggaatattttgtgagttactatgattactaccagcccgaagcctacgttccgtcttccgatacttatattgcgaaagattcggctatcaatgatgaaatagacaagctgcgtttatccgcgaccatggcactggcagagcgcagagatgtgatcattgtggcaagcgtttcctgtatttatggcctgggaagtccggtggattatcagaatatggtgatttctttgcgtcccggtatgatcaaggacagagatgaagttgttgcaaagctgattgaaattcaatatgacagaaatgatatggattttcatcgaggaacatttcgagttcgaggagatgttctggaagtgattccggcatatgagtcagatgttgcaattcgaattgaattttttggtgatgaagtggatagaatcacagaagtagacattcttacaggagagattcgggacgagttaaagcatgtggcgattttcccggcgtcccattatgtggtagataaagagaatatcaaccgtgcggtgaaggcgatcgaagaagaactggaagagcgggtcagagaatttaaacgacaggataaacttctggaagcacagaggattgctgaacggacaaattttgatatcgagatgatgaaagagaccggattttgttccgggattgagaactattcccgacatctggcaggattggcaccgggacagccaccatatacactcattgattattttccagatgattttgtgatcatgatcgacgagtcccataaaacaatccctcagatcgggggaatgtattccggggatcagtcgagaaaatcgacactggtagattatggattccggcttccttctgcgaaagataatcgaccgttgaattttgaagagtttgaaagtaaaatcaatcaggtattatttgtgtcagcgacaccaggaatctatgaagaagaacatgagcttctgcgggcagagcaggtgatccgtcccacagggcttctggacccggaagtagaagtgcgtccggtagaaggacagattgatgatctgatcagtgagatcaatcaggaaatttctaaaaagaataaaatactggtcacaactcttaccaaacgaatggcagaagatctgacggattatatgcgggaaatcggaattcgtgtaaaatatttacattcggatgtagataccctggaacggacagagatcatacgggatatgcgtttggatgtgtttgatgtgctggtaggaatcaatcttctgagagaaggattagatatcccggaaattacgctggtggcaattctggatgcagataaagaaggatttttgcgttccgagacgtcactgattcagacgattgggcgagcggcacgaaattcagaaggtcatgtgatcatgtatgcggataaagtgacggattcgatgcgcctggcaattgatgagacagaaagacgacgcaagatccagatggcatacaatgaagaacatggcatcacgccaaagactatccagaaggcagtgcgcgatcagatcagtatttccaagaaagtagcagcagaagaatggaagatggagaaggatccggagtctatgagcaagaaagaactggaaaagctgattggagaagttacgaagcggatgaaaaaggcagcagcagagctggacttcgaatctgcagcagaattaagagacaaattgatcgaattaaaacaggtcttgaatgaaatagaatagatatataacaggaaggaattttacatgggaaaaaagatggacgccaggcagtatatcaggatacgtggtgcgaatgaaaataatttaaaaaatatagatgttgatattcccagaaacgaattggtagtgctgacaggtttgagtggttctggaaaatcttcacttgcttttgacacaatttatgcggagggacagagaagatacatggaatcgctttcttcttatgcaaggcagttccttgggcagatggaaaagccagacgttgagagtattgaaggattatctccggcaatttccattgatcagaaatctaccaatcacaatccacgttctacagtgggaacagtgacagaaatctatgactatttccgtctgctctatgcaagaatcggaatcccgcattgtccgaaatgtggaaaagaaataaaaaaacagaccgtggatcagatggtcgatcaagtgatgctgcttccggaaggaacaaagatacaattgcttgcacctgttgtaagaggcagaaagggaacgcacgcaaagctgtttgaacaggcgaagaaatcaggatatgtgcgtgttcgtgtggatggaaatctgtatgaattgtcagaagaaattaagttggacaaaaatatcaagcataatattgagatcattgtggatcgccttgttgtaaaaccggggattgaaaaacgaatgacggactctgtggaaagtgtactggcgcttgcggaagggcttctgatcgtagatgtgattggcggggaaccactgaatttcagtcagagcttttcctgtccggattgtggaatcagcatcgaagaaattgagccgagaagcttttcattcaacaacccgtttggggcttgtccgacatgttttggtcttggatataagatggaatttgatgaggatctgatgataccggatccttcgctcagtattcagcagggggctattgcagttatgggatggcagtcctgtacagaaaaatcaagttttacccgggcaattttagatgcgttgtgtgaggaatatcattttagtctggaaacaccgtttcaggattattccaaggagattcatgatcttttgatttatggaacaaatggaaaatctgtaaaagtacattataaagggcagcggggagaaggtgtttatgatgtggcttttgaagggctgatcaaaaatgtagaacgtcgttatcgtgagacaggttcggacacgatgaaggcagaatatgaaacgtttatgcgcatcactccgtgctcagagtgcaagggacaacgattgaaaaaaggatctcttgctgttactgtaggagataaaaatattgcggagctcacagcaatgtccattgataagctgcagcagtttttaaaaaacctggagctgacagagacacagcagttgatcggtgagcagatcttaaaggaaatacgggcacgaatccagtttttgctggatgtaggattggagtatctgacgcttgccagagcgacaggaaccttatcaggaggagaagcacagaggattcgtctggcaacgcagattggttccggtctggtcggtgtggcatatattctggacgagccgagtatcgggctgcatcaacgggacaatgataaactgcttgggacattgaagcatcttagagatcttgggaattctctgatcgtggtagaacatgacgaagatacgatgttggcagcggactgtattgtggatattggaccgggagccggagaacatggaggacaggttgtcgcagtgggaacagccgaagagctgatggcgaataaggactctgtcacaggtgcatatctgagtgggcggcttaaaattccagttccggaaaaacgagaacaaccgacaggatatttgaaagtcgtaggagcaaaagaaaataatctgaaaaatattgatgtgaagttcccgttgggaattatgacatgtgtgacgggggtatccggttcaggaaaaagctctcttgtcaatgagattttgtataagacacttgctaaaaaattgaatcatgcaagaacgattccgggaaggcatacaagaattgaagggctggagcaggtagataaggtgatcgatatcgaccagtcaccgattgggagaactccgcgctccaatccggcaacctatacaggtgtatttgatcttatccgggatctgtttgcggcaacaccggatgcgaaagcaagaggatataaaaaaggaagatttagctttaatgtaaaaggcgggcgctgtgaagcgtgcagtggagatggaatcattaagattgagatgcatttcctgccggatgtatatgtaccatgtgaagtgtgcggcggaaagcgttacaacagagagacgttggaagtgaaatacaaaggaaagacgatctacgatgtattgaatatgactgtggaagaagcactggaattttttgaacatgttccgagtattcggagaaaaatggagacactcaatgatgtgggattgtcgtatatccgcctgggacagccttctacaaccttatcaggaggagaagcgcagcggatcaaactggcaacggagttaagtcgcagaagcacaggaaagacggtctatattctggatgagccaacgacagggctgcattttgcagatgttcacaaactgacagaaatccttcggcggttatcgggtgatggaaatacagtgattgtgatcgagcacaatctggatgtgatcaaaacagcggattatattatcgatatcggaccagaaggcggagacaaaggaggtaccgttgtagcatatggaactccagaggaaattgcggcaaatgaaaaatcgtatacaggaaaatatattgcagcaattctgaataaaaaataaaatccgcaaaaggggtttccaagtggaaaaaattttattatacttaactatgcgagtatctgagccgaagagaagacagattcataaatgactgagaaatacaaaagaggggaaaaagaatttgtaaggctggaggagagaaaatggctgtagatatcggaatagatctgggaaccgcaagtgttcttgtatatgtgaaaggaaaaggcgttgttttgaaggaaccatctgtagttgcatttgacagagatacgaatgtgattcgggcgattggtgaggaagcacgtctgatgcttggcagaacgccgggcaatattgtagcggtgcgtccgctcaggcaaggtgtgatttcagattacacagtaacggagaagatgattcagtattttgtaaagaaggcagttggaaaacggacctttaagaaaccaagaatcagtatttgcgtgccgagcggcgtgacagaagttgaaaaaagagctgtggaagaggctgcatttgcagcaggagcaagagaggtacatttgattgaagaacctgttgctgctgcaatcggagcagggattgatatcgccaggccttgtggaaatatgattgtagatattggagggggaacagcagatattgctgttatttcgttgggcggttcggttgttcatacttcactcaagatagcgggagatgattttgatgaagcccttgtccgttatatgaggaaaaagcataatcttttgatcggagagaggacagcagaggatattaagattaagattggaactacctatccgttggtggaagaggagaagatggaagtcagggggagaaatctggtgacaggtcttccaaagacggtgacagtgacatcttcggaaacggaagaagcgcttcaggaaacggcaggaaagattgtggaagcggtgatttcggtattggaacagactccaccggaactttcagcggatattttggatcggggaattgttcttaccggaggtggcgcaatgctgcgagggttagaagaactgatcgaagaacggacaggaatcgctaccatgacggcagaagatcctatgaaagttgttgcgatcggaaccggagagtttgtagaatttatgagtggcaggaaagatttctaagaagaaatcgggatgggacaggctgcttcggcaacaggatgaaaatcctgaatgccgggggagtctgtcttctattgttgacaatatatataaaagaatacatgtatacaatgttgtgataagatgcaaatgggaggaagaagtggagactgtaacaggatatgtggaacatattgtgtttcgcaatgaggaaaatggatatactgtgtttcaactggaaagtgaggaaggtgaagtaacctgcattggaactttaaacttcatcagtgaaggtgaacgtttggaaatcaaaggcgaatatgtgaaccacaatatctatggaaatcagttgaaaatcagttcttatgaaataaaagaaccggaagatctgatctctatagagcgttatctgggatccggtgcaatcaaaggtgtcggtgcagcgctggcaggaaggattgtaaggaagtttaaaacagatacatttcgtatcatagaagaagagccggaacgacttgcggaggtgaacggaatcagtgaacgcaaggcgcgggagattgcggtacaggtggatgaaaagaaggggatgcgaaaagtgatgatctatttgcagaattttggaatcagtaccgctctggccgccaaaatctatcaaaagtatggaagtaaagtgtatgagatcctggagactaatccatacaagctggcagatgatatcgagggagttggatttaaaactgcagatgagattgcggcaaagataggaattcataccgattcggactttcggatccagagtggtatcttttatgtcctgcagcaggctatggcagaggggcatgtttatttgccgaagaatgttttagaggcaaggacttcccggctgctgggagtggagattgaaggaattgaaaaatatattatggatctttgcatggaacgcaaaacggtaatgaaagaagtggaggacgagatacgcgtttacccgtcccgtttttattatatggaactgaatgtagcccgtatgctgaatgatttggacattgattgtgcaatgccggaagatatgatggaaaaacgacttcaaaaagtggaagaactggagcagatttctttggatccaatgcagcatcaggccgtgatcgagtcgatcaaacatgggcttttgattttaacgggaggaccagggaccggaaagacaacaacgatcaatacgatgattcagttttttgaaagcgaagggatgagtattttgttggcagcgccgacaggccgcgctgcaaaacgaatgacagaagcaacaggatatgaagcgcaaacaatccatcgcctgcttgaagtcagtggaaatccggaagaagaggggaatgtcaatggatttttaagaaatcgtgacaacccactggaaacagatgtactgatcattgatgaaatgtctatggtcgatctgacgctgatgcatgctctgctgactgcaattgtgccgggaacacggctgattctggtaggggatgtgaatcagctgccgtcagtaggaccgggaagcgtgctgaaagatacaattgcatcgaataagttccatgtggtgactctgacaaagatcttccgtcaggcgggggaaagtgatattgtattaaatgcacataaaatcaatgcgggagagcctgtgatcataaacaacaagagcagagatttcttctttttaaaacgtcaggaggctgatgtgatcataggggttgtgattatgttgattcaaaagaaactgccgaaatatgtggatgcctctccgtacgatattcaggtgatgacaccgacaagaaaaggattattgggagtggaacggctgaatgtaattttgcagagatatttaaatccaccggatccaaagaaggaagaaaaagaagtgaatggaaggattttccgcgttggtgataaggtcatgcagatcaagaacaactatcagctggagtgggaagtgtgtaccaaatatggattgacagtagataaaggaatgggaattttcaatggggatatgggtgtcatccgggaaatcagttcttatcaggagaccttgacagtggagtatgatgagaagcgtctggtagaatatccatttgagctgttggatgaactggaattggcctatgcaattacagttcataaatctcagggaagcgagtatccggcggtggtaattccgctgcttcccgggccaaggctgttgtataatcgaaacctcttatatacagcagttacaagagcgaagaagtgtttgacaatagtagggagtgaagatacatttcaggaaatgataaagaacaaaaacgagcaggaacgatacacgagtttagacgagcgtatacaagagttttagaatggctgtacccttcggtttgcccattttgtgaatgtgtatacaagtatggaatctgcccgtcatgccggaaaaaaatagaatatatccatcagccgcgctgcatgaagtgtggtaaaccgctgaagacggaagaacaggaatactgtcgggattgcgaaaagaggcggtatgcatttgatatggggagaagcctctgggtacataagacgccagtttcacaggggatttatcgatttaaatataaaaacagaagatgttacggggagatatttgcagcagaaatggccgcagaatttgagcatattgtaaaagagtggaaggtcgaagaaattataccagttccgctccatagatccagacagcgtaaaagaggatataatcaggcacagattctggcggaagagatagggaaaaaacttgagatccctgtaaaaaaagatgtagtaaagcggattcagaaaacgcgcccacaaaaagagttaggaagcagggaacgaattcagaatttgaaaggagcattcggagtttccagatcctggatcccgaaaaaatgtgtattggttattgatgatatttatacaacaggaaatacgatacacagagttactgaagtgttgaaaaaagcaggtgtgcaaaaagtatattttttgactataagcattggacaaggactctgacagtatgatatactaaaaatgatgtttaaaaggcaatagatcgaggtggaaacatgttggataaaagaaaaatacgactgatgatcaagatggcttcttatgaaaaacagggggctgaggaagatctgaaaatcggcagttattataaaaaagattatgtgagcatgaatgtatgggcgacagccatttggtttacggttggatatgcgataatagttgctctgatcgcattttgcactctggaacagattttagaaaaacttacaatcttaaagcttctgttcctcatgggaactgtggtagggggctatctggttcttttgattctttattgcaccggcgcaagaatgttttataaaaagaagcataatcttgccaaacagcatgtgaaaaaatactatcgggatctgtcccgtcttgaaaagataaacatgaaggagaaaaaataaatatgagcacattacttgtatggaaagatcagatagaaaaaatttatgcaaagtattctttttatattgcgaagatcctgcagtttgcattgggggtgtttgtgtttggattgatcaattcaaacataggatttatgaaggtgctggcatcgaccgtgtgcacagttggtctggcagctgtcacagcatttttgccgttgggaatgctggctcttgcagcagcagtactaatattgatacatttgtatgccctgtctttgccggtagcgggattatgcctggcaatttttcttgtaatgtatattctctatgtaaggtttacaccgaaaaaatcctggctgatcgtagttgcggcggcagcagttgcattgaaagtgccatatgtgatcccggtagcgtttggactgttgggaacaccttcatttgcagtttcgatgatgctgggaacgattgtttattatatgctccacaccgtaaaattgacggcagcggcatttcagagcggaggcgtgaaagaacttctcgatggaatcatggtatttacaaagcagatacttgcgaataaagaaatgtggatgatggtagtggttctgcttctggcgatgatggtagtgtatggggttcgcacaagagggatcagtcatgcatggaagactgcatctgttgcaggttcgatcgtagcagcaatcctccaggccgcaggatgtatggctttggacatttcttttcaggcgggaggaattctgttggattttgcagcagcagttcttacagggcttgtgatagaatttttctttctttctgtagactattcaagaacagaaacgctgcagtttgaagatgatgaatattattattatgtaaaagcagtccctaaagtgggagtgacactgccggaaaaacaggtgaagcacattacagagcctcatgatgaaccaaaggagcctgaaaaaacggagaaggctatagagacagagccaaagcaacagatacaggagactgtggcgattgatacaaatcagattcaggaagcagatctggaaaaaaatgtagacgaacttttattgacgcagagtctcaatgaagaattaagacagaatcagacaaatacggaagatgatctgagcctcacgaaaagtctcggggatttatggacgaagcagcctgactctgacaaataaaatcgggaggtgactggatgggagactggattagaaatttttttaacaactacataaatggtttatattttccaacggtacacctgacagatgtcatagagatactgatcatcacggtgattgtgtatgagattatgctgtggatcaaaaatacaaaagcatggatgctgttaaaagggatgatcatgctgggagcatttttcctgctggctgcaattttcaagatgcatacgattttgtttgtagccaaagagtcgatcagtgtacttgcaattgcagcggttgttgtatttcagccggaacttcggcgggcactggaaaaactgggagaaaaaaatttcctgaccaatgtgagtctctttgataaaggcaaagagaatcagcgcttttcagatgaaacaagagatggcattgtccgtgcgtgttttgacatgggaagtgtttgtacaggtgcgttgatcgttgtagagcaggcaattcatttgacagaatatgaagtgaccgggattgaactggactgtaaagtgtcatcacaggtcctgatcaacatttttgaacataatacaccgcttcacgacggggcggtgatcatacggggaaaccgcattacatctgcgacatgttatcttccgctttcggacaatatgcagatcagcaaagaacttggaaccagacacagagcggcgcttggaatgagtgaagtctgtgatgcggtagtaatcgcggtgtccgaagaaacaggacaggtatctgttgcgatgggaggacaattagagagaggagtgtcacgagaaaggctcacagagcggctgagtcggattcagtacagatcagcagaaaagaaaaaatcaaaaatatggaaaggacggcgcaagaatgaagaagcataaatttatggaaaatctcagcctgaaagtgattgctctgttttttgctgtgttcttgtggctgattgtaatgaatattgatgatcctgtagatacgcagacgtttgataatattccggtagaggtaaaaaatgaacaggtggtaaagagcaaagggaaaacgtatcgggttttagatggaacagagaatgtgagtgtaaaagttacggcaaagcgtgaaattttggaaaaattgacctcttctgattttagtgctgtggcggatatgcaggaaatgcagataaatagtctgattccgatcaaggtttcagtgaagcggtatagcaatgaatgtacagcggaagcttcgccgaacaatctggtcgtagaaatcagtgatgtcaaacaaaaagtatttccactgaccgtcagtgtgtccggaactccgcagaatggatgtatcatcggaaatatgacagtgaatcctgaaaaaattaccatcaaaggttcagaaccgcttgtggaaagtattgaaaaggcagttgtgaaagtcgatgtgacaggacgagccgaatctggaaccgttcagggaaatctggtactttatgacagtcagggaaatattgtggatcagagtaagttgagcaacaatttaaatacagaaacgggaattcaggtagaaattcagatgctgaatacgaaagaagttccgattgtatacgaacagccaaccagcctgaaagaaaactatattgtcacgggatggacatgtgaaccgcagacaatacagatcagcggcacaaaagcagtattggatggggtgtccgaaatagaaataccggcatccgaaatcgatgtgagtgatgcaaccaagaaagtggagaagaccgtcgatattgagcagtatttgccagaaggaatcggcctcgtggaggagaatgcaaataccattttgatcactgttatgatagaaaaagaagggtcgaagatgatagaatttccggtggaaggcatccaggtcaataatttgaaagataagtatgagcttttgtttgaatctgatgaagtgattgagttaaaatttatcggagaacagactgtactggatcaattggatattacgaatgcagtatccattgatcttcagagctgcaaagcagcaggggaatatgaaattccggtatcaatcgaagtgcctgacggagtggagttggaaaaacagctgacaattaaagtgaagctgacagaaaagaaagatgatacaagtcagacagcagatcagaaaggaaacagtacgcaggaagaagcggaaaaataagagaggagacatacaatggtcagcggaaagacaaaaatcaagaatcctacaggcctgcatttgagaccggcaggattgttctgcaaaacagcaatgcagttttcaagcaagataacggttagaaaacaagtccgaaatgaggagatcactgccaatgcaaagagtgtattaagtgtacttggggcgtgtatcaaaagcggagatgagattgaagtgatctgtgaaggtgctgacgaagcagcagcacttgcagagatgataaggatcattgaagatggacttggagaataaaataagcgaaggagaaagaacatgagcaaagcaacgttagtcgtaatggcggcaggaatcggaagcagatttggtggtggaatcaaacagttggagccagttggacccaatggagaaattattatggattactctatttatgatgcaatggcggccggatttgataaagttgtatttgtgatcagaaaagatcttgaaaaagattttaaggaagtgatcggaaaccggattgagaaagttgtggaagttgcatatgcatatcaggaagtagatgatattccacagatgtataaagaacgttttcaggaaaggacaaagccatggggaactgggcaggcaattctttgctgcaagcatgttgtagacagtccgtttcttgtgatcaatgcagatgattattatggaaaacaggcatacgtggaagcatttgaatatcttacagaagaaaaaacagcagacaacccggaaatctgcatggtcagctttgttttaaaaaatacattgagcgagaatggcggagtgacacgcggtgtttgtaaagtggacgaaaatggatatctggcagatatcgtggaaacatcgaatattgaaaagtataaggatggagcagcagttcgtaaggaagaagcatatcagccgatcgatatagagtccagtgtttccatgaatatgtggggacttactccggaatttttccagattctggaaagcggatttgaagaatttgtggcaaatactcctgcagataatctaaaagcagaatatctgctgccgacaattataggagatcttctggctgaaaagaaacttgcggtaagggtgttgacatcaaaagacaagtggtttggtgtgacatataaggaagacaaagattccgttgtttctgaattacaggctttgattcgggacggtgtatatcctgaaaaattattttaaaagatgaaaaagagggggcgcagcaggaattgctgcgtttctttttgtcgattaaagcagtggatgatgtgaaaaagtatagaaatttggcgaagtttgtgttatcctcataagagtgttttgaaaaagtgggtaaggagaggttataggattgcaggaagttaaaaaaaataaaagcagaaatcatgaaaataaagcagaaagagttgaaaaaagtgaaaaaagaaacttgaatgacgttacggcagaacaaatgaaaatgaatatcgggcttgttcttttggggaaaacaataaagggaattcaggttgttataaaaatattattatgtgttttaacgatattgctttcatttctggcaattcttcttcatgaagcagccaattggatgttggcaacctggacgaatctgtctatggaagaacttgtggcgcagatgaagacgccgattcagggaaccagccatgaagtactctgggattttgtggaaacctgtgttccggctgcggttatggccgtattttttgtagtgattgtaatcgcacttgcaagaaggacaaagattacaaaatgggtcgtgcagataggagctgttgcaggttctatggcactgatcgtatcttcagcgcaaatggtatggaatgaactggatgtgggagaatatctggagaatcagaagacggaatcacattttatagaagacaattatgcaaatcccaatcagatacagattcgttttccagaacaaaaaagaaatttgatctatatttttatggaatctatggagacaacctatgcttcaaaagatgtaggcggcggacttgatttcaactgtattccagagttgacgcaattggcgatggaaaatgtcaatttctcaggaacagagcagttggggggcatttatccgacagatggttctacatggacgatgggcgcaatggtagcacaaacatcaggactgcctttgaagctgaatcttcgcgcagaaaatgtgagtgaagatattgaggttttgccgaaagcgaaaacaatcggagatattcttggagaacagggataccgccaggaagtcatgtttggttcagaaggagaatttgcaggacgaaaacaatattttgaaaagcatggtgggtatgaagtgttggattataaatatgcagccgagaatggatggcttccaagtcctgattatagagtatggtggggatacgaggatgaaaaattgtttgaatttgccaaagtccgtcttaacgaactgggaaatggccaacagccttttaattttaccatgttaacagtagacacacattttgaagatggatatccttgccgattatgtcaggatttatatggagagcaatatgcaaatgttatggcatgttccagcagacaacttgtagaatttatacgctggattcagcagcagcccttctatgaaaatacgacaattgtattggtaggggaccatttgacgatggacagtgatttttgtgccaacgtatcaccggagtatcagcgtggagttctcaatatttttgtgaatgcacctgtaatggcagtgaatacaaaaaacagaattgcatcaacaatggatatgtttccgacaacgattgcggctctggggggagaaatcgaaggagatcgacttggattgggaaccaatttgttttcgggaagaccgactttggcagaagagcttggaatggatcagttaaatgctgaagttcgaaaaaattcacttttttatgctggacttgcaggtggaatggaagtagatgattcggtcatggatatgaaatagaagtggagaagagagtaatatgaacaaaacagaagcacaccagcggaaattgacggcaggggaaacaatatgggtaatcggtttattttttctgtttttctttttaagtatgcagaaagagtttaattatgcaccggatgaactgatgagatatcagattccagaatacatttttcggcataatgcattgccgaatggaaatatggaagagctgagaaatgaaatttggggattttcatatgcatattatccgttttttctgggaccattgttaagtgcaggctttatgaaaatagtatctgtttttacagtggatccgtttgcgctggtagtggcggccagatttacaagcgttctaagtggtgtggcagtcacatattttgcgattaagatagcaaaagagctgtttgataaaaatacaaaatggatttttattacgttgacaacattgattccacagtttatttttttgaccacatatgtaaataatgatgtgatagcggtggcaggaagtgcaatgatcgtttacgcatggattcttggaattcgtgaaaggtgggaatggaaatcctgtgttctgctggcagttggaatcggcgtatgcgcgttgtcatattataattcttatggctggattctttgcagtatctttgttttctttgcttcagaattatggcagagaagaaaaaaaataagtgataaggaactgtggaaatggggaatctgtatcagtgtgatcgtagttgcaatgatctcatacttttttatacgaaatgcaatgttgtatgatggagatttcctgggaatgcgttctttgacggaagcatcagaaatgtatgcaagagaggatataaagccttcgaaccgtccgactccgatgaatttgggaatgggactgggggaaatgttgaatacaacgcaatatatgggaaaaacatgggcgaatgcaacattccagagttttgtggcagtctttggatacatggatgtatatgcaccggactgggtgtacaatgtatataaaatagtattgttacttggagggatcgggattataataagacttgttcaaaggttaaaaaacgacaggacgaaacagattaaagaacaagtaattttccatgtgaatatgctgatctgtatggtgattccggtaggcctgagtatatattacagctacgcaacagattatcagccacagggacgttattgctatccgatgctgttggcattgacatattttgttgcaaaggggatggagtctttggtgaagctgcttccttcggaaaaagcgcagatgatgttgtgccgtacaataagtgcattatttggagccataacggggtatgtatatttgtctatgtatatgttttggttataataaatagaaagaggtgcttgataaagtggaaaaaaagccgattttatatatcgtgataccatgttataatgaagaaaaagtattaccgatcacggctcctcaatttcttgcgaaaattgaggaattggtgcagttggataaaatagggacaggcagcagagtactgtttgtggatgatggaagcaaggatgatacatggaaactgattacaaaatttgcagaggaaaatgaaatcttttgtggaatccggcagagtcggaacagagggcatcagaacgctgtacttgcagggctgatggaagcgaaagaccgggcagacatcacaatttccattgactgtgatggacaggatgacattgacgcaatgaaccggatggtagatgaatatctggatggcagtgaagttgtttacggagttcgcagcaaaagggatacagacacatttttcaaacgctttactgcggagggattttataagctgttgaattggatgggggcagaagtcgtctttaatcatgcagattacaggctggtatcttccagagtgctgcaggcgtttcaagaatataaagaagtgaatctgtttttgcgcggaatgtttccactggttggatttaaaagtacaagtgtatactatgagaggcatgaacggattgcaggggaatctcattatccattgaaaaagatgctggccctggcgtttgacgggattacgagtctgagtgtgaaacctatccggatcataacgggatttggtaccctgacatctgttttaagtctggtcggtgtcgtttgggcggttgtcagagcaattttgggatacacagtagcaggatgggcaagcattgtaagtattgtatgttttatgggaggtatccagttgatctgtcttggggttattggagaatatattggaaagatctatatggaaacaaaggcaagacctaggtatattatcagtgaccggacatttgacaaagaaaccaaataaatattcagtcttagacttttatatagatatcatacgtaaagagaaaggggttcatgcaaaagaatgaaaaaagtacagaaggtacttgcattactgctgacagttatggttctgtttactacgacagggctcaatgtggcagcggtggaacaggtggatcctgttgcagagagtgagggagatatcgatgcactggagacacaagcagaagcacagcaggcttccgaggggactttggagtatgtatatgtggatgaatcggtagtgaatactccgcagacacagaatattgcggttggcttttcggatgagtcattgatactggaatcggcggtattgcattacagctctgttgtaacaggtgctgcgtatgaaatgccgtcagcatcgattgtaaacaacactgtgttgttcgtgcaggattatccgcagggatcagaagaagatgtgtaccagctggatagtcttacatatcagagcgcagacgaaaccgtgacagtgaatctgttggaggaggagattgatgccggatatacagtgacagctcagccggagcaggaggtccgttccgaagaagaggttccggatgtggcagtgtattctttgagcgaaagtggagaggtactggaagcttcggcggatacagaaaacatcgaagcggcagttgcagatgtactggatcaggcagatccggtgtcaccgcttgcaagagaagtcagaacaaataaaacagtagtaatctgtgccggacatgatgcaactcatgtgggagcacggggaaatggattgaaagaagaagagctgacatttaaggtggctcagtactgcaaacaggcactggagcagtatcagggagttactgtctatatggacagagattctgtttcctgtaaatacccgggacagagcacaagttattgcctcaaccagagaatcaaagatgcggctgcgatgggggcaacggtatttgtagacattcactttaatacaggtggaggaaccggagcagaagtttattatccgaataaaagttatgatgaaggaattcatcaggaaggtaatgagcttgccaacaaaattttaaaggaattaacagcacttggtcttccgaatcgtggtgcaaagattaaagatggaactaccggggagacagatgctcagggaaacaaagatgattattttacgacaaattatctttccaagcagtatggaatgacaggtgtgatcgtagaacatgcatttttggatcatgcatcagatgcagcaaaactgaaagatgagaatttcttaaagaagctgggagaagcagatgcagccggaattgcagctacctatggattttccaagggcagtggcggcacggtagacggtggaaacgctgaagtccggatcaaggataaaaatgattttaagggaactgcaaagattgaagtaaatggagttggttccggggcaaagatagcaatctggagtgacgataatggacaggatgatctgaagtggtattcggtatcaggaaacagtggaagtataaaatttgatatcaaaaatcacaaacagtcaacgggtacatataatgtacatgtatacaatgcatcttctaccaaaatcctctgcaatacaacgttccgggtttcgaaagatacatcagcaaaacttaccatttcttctgttgacggaagacaggatttatatcgtgttcagttggcttttgcagatgtgccggaagaagtaagcagtgttcagttcccggtttggagcaagggggatcagagcgatatccgctggatcacagcacagaaaaagtcatctggagtttgggtgacagatgtgaatatttccggataccagaacggggatgtttaccaggtacatgcttacgcaaatctggtgaatggagcgcaggagtttgtcggaaaatcaacattcaaagtagccggtccgagtgcagctgtttccgtgcagaattacagtgcggaaaaaggaacatttgatgtaatcatcaaaaatattgtagcaccagcggggattcaagaggtacaggttccgatctggagcaaaggagatcaaagtgacattgtctggtatcgggcggtaaaacagtctgacggaacttacaaggtggcagtagatattgcaaatcaccacaacaatgcaggtacatataatattcacgtctatgttcttggaaataatggaagccagaccatggttgcttcggcgacacagaaggtcgaaaatacgaaggcagagattaccgcaaaggacaaaaatggcaaagaaagtaactatgtactgacggcgaaaaatgtaagaaatgccgatcatgtcagcttcgctgtctggagcgatgtcaatggacaggatgatctgatctggtatgacagcaaaaaggcgggcagtacatggagtaaagaaattgcaattgcagatcacaaaacagcaggggtatataacgtacatgtatataccatggctgggaaaaagcagcagtttataggaagtacaacatttgaggtcagtacaccttccggaaaacttcaaattgaaaattacaatcagtccaaaggcagctttgatgttatcttgaaagatgtaacttcaaaatctggaatcagtaccgttcagattccggtctggagcaaggcaaaccaaagtgatatcgtatggtatcaagcggacaggcagagtgacggaacttataaaacggtggtaaagacgaaaaatcacagtcagaacacaacgtataacattcatgcatatgtaaccgcaaaaaatggaattatgcagtttgtagatggtacaaacaaaaatgtgagcaaactggagccaaagatcagcgtgtcagatacagacggacagcaaagaaaatatacagcggttctggaaaatgccagtgcagtcggccaggtcagtgatgtaaaatttgctgtctggagcgatgtcaatggacaggacgatctggtctggtatcagggaacacggaaaaacgcagatacatggaatgttggaattgaaatcagtcgtcataaaacagccggtatctataatgttcatgtatatggcatgattgacggagtgcagaagttcatcggagaaattacatttactgtgtcaaatccaaaaggaacagtagaagtgaaaaactacaacagcgcaaaaggaacatttgatgttgttgtgaagaatatctcttcaaaatctggagtacaggcagtacaggttcctgtatggagtcaggcgaatcaaagcgatatcgtttggtatgcagcctcacgtcagagtgacggaacttataaggcagaagtgaaattggcaaatcacaatcagaacaaaggtctgtacaacgttcatgtgtatattacgacagggactggaattcaggcatttgcagataagacgacatacaacgtttccgggaatcaggaagagaatgatacggcgaaattaacgacgatcatgggaacatcaacgacgacggttgagcagatgatgcgttattatgaaagtacaggaaacacttatccggcagaagcgcttggaaaaggcggagcgccgacattgaaagaattttgtcagatctattatgacgaagcagctgctgaaggtgtgaaggcagaagtagcatttgttcaggctatgaaagaaagcgcatggctgaagtttggcggaattgtaaaaatcgaacagtttaattttgcgggaattggagcgttggatggaaattcacagggacagtcagccagcttcccggatgtcagaacaggaatccgcgcacagattcagcatctgaaggcatacggttctgcggaacctttgaaaaatgcatgtgtagatccaagattcggatatgttactcgcaattctgcaccttatgtagaatggctggggatcaaagaaaatccgaacgggacaggctgggcaagtgacgcaaaatatgggtatgcgattgttaatatgataaatgtactgaaaagtaaataagcagatttgtcagatcgttgagaaaaagaatttcttatacttcgtaagaggtgtgagagattcttttttgttatgttgaaggattgtgcagagtctgagataaagttgaaaaccgcgcggggatgtaattaaaattgttgcatagatgttaaagaaatgttataattctaaagaatatattggaggttaaaattatgagaacatatttagtaaccggtggagccggatttatcggatcaaactacattcattacatgtttaaaaagtatgataacgaaatccgcatcattaatgtagacaagctgacatatgcaggaaatcttgagaacctgaaagatatagaagacagagagaattatacatttgtgaaggcagatatctgtgatgcagatgcgatcaatcagattttcgaagaaaatgatattgacagggttgtacattttgcagcggaaagtcatgtggatcgaagcatcaagaatccggatgtatttgtaaagaccaatgttttgggaactcttgtgatgctgaatgctgcaaaggcggcgtgggagcttccggatggaacttttaaagaagataagaaattccttcatgtttctacagatgaagtgtatggttctctggaagaagagggagaatatttctatgaaacaactccatatgatccgcacagtccgtattctgcaagtaaggcatcttctgatatgctggtaaaatcttatatggatacatataagttcccggcaaatattacaaattgcagcaacaattatggcccatatcagttccctgagaagttgatcccgctgatcatcaataatgcactgcagggtaagaatctcccggtatatggagatggaaagaatgtcagagactggctgtatgtagaagatcatgcaaaaggaatcgacatggtgcaggagaagggaagactttttgagacttataacattggcggccataatgaaaagcagaatattgagattatccacatcattctggacacattacaggagatgctgccagagggagatccaagaaaagaactggtcagtgaaaaactgatcacatatgtggaagacagaaaaggacatgacagacgttatgcgattgcaccggataagatcaaagaagaagttggctggtatccagagacaatgtttgaagatggtattcgcctgacgatcaagtggttctttgagaacgaggaatggatgaagaatgttacaagcggtgactatcagaaatattacgaagaaatgtataaataacgtgttcaaacaggcagtatcctaggatactgctggtttgcgttatgaggttgaatctacgaacaggaggagattgaaagatgaaaggtatcattttagcaggtggatcaggaacaagactttacccattgacacaggtgacaagcaagcagttactgcctatttatgacaagccgatgatttattatccgctgagtattttgatggaagcagggatccgtgaaattttgatcatttccacaccggatgacacaccgagatttgaagaacttttgggagatggaagccagtttggaatccagctcagttataaggtgcagccgtcaccggatggacttgcacaggcatttctgcttggggaagagtttattgacggggaaagctgtgcgatgatccttggagacaatattttccatggtcatggtttgagtaagagattgaaagcggctgctgcaaaagaagatggagctacagtgtttggatattacgtagatgatccagagcgttttggtgtagttgaatttgatgaggaaggaaaagctgtttctctggaggaaaagccggagtatccgaagtcaaattatgcagtgacaggattgtatttttacgacaaacatgtggtagaatatgcaaaacagatcagaccaagtgcgagaggagaactggaaatcacggatctgaacagaatgtatctggaaaagggaaatctggacgtcacattgcttggacagggatttacatggctggatacaggaacccatgaatctctggtggatgcaacaaattttgtaaagacagtggagacacatcagaaccgcaagattgcatgtctggaagaaattgcatacaacaatggctggatcgataaagaaaaacttggaaaagcatgcgatctttatcagaaaaaccagtatggacgttatctaaaagacgttctggatggtaaatatattgatcagaaataaaggagagtttggatatgggaaaaattaaagtagaaacatgtgagattgaaggactgaaagtaatcactccaaccgtatttggcgatgagagaggttattttatggaaacttacaattacaatgattataaagaagccggcattgatatggagtttgttcaggacaatcagtccagttccaaaaaaggagtactccgcggccttcatttccagatcaattatccgcaggacaaacttgttcgtgtggtaagcggagaagtattcgatgttgctgtagatttgagaaaaggctctaagacctatggacagtggtatggagtattgctgtcagcagagaataaaaaacagttttttattccaaaagattttgcacatggatttgtagtgctgtccgattccgcagagtttgcatataagtgtacagatttttatcatccaaatgatgaaggcggtctggcatggaatgacccggatattggaattgagtggccgattccggaagatatggaactgacgatttctgaaaaagatcagaaatggggcggaatcaaagaactgaacaaatagaagccggaggaagattgtgtcaagttatattcagaattttaaaaagtttcagcctcttttggcagaacttgtggcgagagatatcaagattaaatatcggcggtctgtccttggagttctctggacattgttgaatccattgtttatgatgatcattttgtccgtagtgttttccagcatttttaaattcgatattgagaattttccactctatatcttgagcgggcagttgatttttaacttttttaatgatgcaacgacaagttccatgacttcgatcatcggaagtgcagcgctgatcaaaaaggtatatgtaccgaaatatttatttgtgattgccagagtcttttcaagttttatcaatttgatggcatctttggttgcgctgatcctggttatggtggcaatgcgtgcagaattgcattggacagtagtcctgagcgtgattccgctggcgatgattattttattttcgctgggagtggggatgctcctggcagctctgactgtcaaattcagagatatcatgcacctgtattccgtgtttacaacagggcttttgtatttgacaccggttatttatccgatgtcaatcttgccggaagcagtccgtatcgtggtcaatatcaatccgttgaccaatatggtgcagatgttccggaatgtgatgttctacaatacgctgccgaccttttcatcaatcgttctgggaatggcagaagtagcagttgttcttgtgttgggaacgtatgtattttataaaaatcaggatgaatttatactgaatatttaggagaagtatatgggacaggaaacaattatcaatgtggaacatgtctcgatgagatttaatctttcatcagagaagtttgacagttttaaagaatatgtgataaagagcttgaaaaaacaggtctcttatgacgagttctgggctttgaaagatgtttcttttgaggtgaaacgcggggattctcttggattgatcggtctgaatggaagtggaaaaagtacgatgcttaaaacaattgcaggcgtgttaaagccgaccaaagggaccgtgactgtgggtggaaatattgcgcccctgattgaattgggagcaggatttgatatggatctgactgctcgggaaaatgtgtttttgaacggagcgctgctcggttataacagagcccagatggaagcccagtatgaagatatcgtagaattttcagaactgcgggattttatggatgttccggttaagaatttttcttccggtatggtgtctcgtctggcatttgcaatcgcaacgattgggattccggatattttgatcgtggatgaagtgctttccgttggagatttccggtttcaggagaagtgtgaagccagaattcagaacatgaaagatcagggaacaacgattctgtttgtatcccatagcattgaacaggtgaaaaaaatctgcaataaagtagtatggttggatcatggggtgctgaagatgttcggagatgccaaagagatatgtggcgtatatgaaaaagcataaagaggaattatgaaaatgaaaaaatatataaaaacaggcataggaattctgattgttgtagttctggcttttctgtatgcacatattgataagaattcatatttatatgacagaaatgcagatacatcagcatttatcagtacaggaacgcttttggaaggagaatcgattcgtcaggaatttaccagtcaggaagagctcttaagtggaatcaacctgaaatgttccattttgggagatgtatctggtgtagaagtacagtattgtctgaaggatgcagagacagaacaagagattgtatccggtattataagagcagatgaaatcaaaaataataaatttaatctgcttgaaatagaacagatcgatgctgcaaaaggaaacagctatctgtttgaacttacagaaacgggcgcagataccacaaatggagtgagcttttatgtagtgcctcaaaaagaagaagatgcgcaggttttgtacgttaagaaccatgagacagaaggtgcgcttgctgcaagatatgtcagccatcggtttgacgcagagacttttttagtactgcttgggtttgttgcatttattgtggtctttatgaagttattatacaagttattcaaatagtaggagaacaggatgaaaaacgaattttatgtgacagcatatcgatttcatgtaaaagacagaaacacattgctgatacaggggtggtttcaggagaatgaaatcggggataatcaacttgtggtaaatatggatggcgaaaatctggattatgcaacagagcagcatgcggatgttgtggatgcacatcagtgtgcagatggaaaagcagaagtgaagaacagggtgtatctttgggtacgtctgccgaaagactggcaggagagaaaatgtctgactctggtgaatcaatgccaggggcaggaaaaagaaagcctgaagataaaagtttcacagcttgtaaaaaaagaaaataagatcgagtactgcattgatggtggtacagtgggaaatcaggtgttttgtgtaacaggatggtttgtgagtacagatgacgtgaagattacattgtatgacagtgaagacagaaagttagagagtacggtcaaatacaaaagaagaaatgatgtaatgcgtcagtatccggaatgtacggatgcagaagtacatggatttacagcagaatgtcatggaacagttccaaaaagaattacaattgcgatgaaatctggaaaacgagctgcaaaattcaatctgatcttaaaaccgtcaaaaatcaaaaaaggcattcagaaactgaaaaagagtggagttaaagcgtatgtgtattatcagcagttcggaatgaagcggacgatggagcggttttatacaaaattgacgcacaaagatgaagtctcctataaaaattggatgaagacgcattttccgacggaaaagatgcttgcagaacagagaaagcagaaatttacgtatgcaccgaagatttcgattgtcgttccgttatataaaactccggaaaaatatctggatgaaatgatagattcgatcaaaaaacagacatatagcaattgggaattgtgtttgtctgatggaagcggaaaagattctccaatcaaagaaaaattgcgtcagtatgcggcaaaggatgcgaggatcaaggtggtacacaatgaaaagcagctgcatatttcagacaatacaaatgaggctttgaaaatttgtacaggggactacattgcttttggagatcatgacgatctgcttgcaccagatgcattttatgagtgtgttcgtttattgaatcaggatcagaccattgaagcaatttatacagatgaagataaggtctccatggatgggaaagaacatttccagccgcactttaagacggactttaacattgatcttcttagaagcgtgaactatatctgtcatttgtttgtggtaaaacgaagtctttttgagaaagtcggattgctgaaccatgagtatgacggtgcacaggattatgactttgtattgcgttgtgcagagcaggcggtgaacatccgtcacattccaaagatcttgtatcactggcgtgcgcataaagattcgacagcagaaaatccggaaagcaagaggtatgcatttgaagcggggatccgtgcgatccaggcacattacgacagatgcggaattgatgcagaggtttcagcagagcagttgaatggtatttatagaagtaagtatcatctgaaagagcagccgttggtatctgtgatcattccaaacaaagatcacacagaggatctggacaaatgtattcgttccattgaggaaaaaggaacctataaaaatatcgaatatattgtaattgaaaataacagtgaaaagaaagaaacatttgaatattatgagaagcttcaggcagaaaatccaaaagtgaaagttgtgttctgggagcgggaattcaattattctgcaattaacaattatggggttggatttgcaaaaggagagtatctgctgtttttgaacaatgatacggagatcatcaatcccgactgtatcgaagaactgttgggatattgtatgcgtgatgacgtggggattgtcggagcaagattatattatgaggatgacacgatccagcatgtgggtgtgatcataggtttaggcggagtcgccggacatacctttgtcggagaaccaaaagattccctgggatatttcggaagaatcgtaacagcacaggattacagtgcggttacagcagcgtgtctgatgacaaaacgaaaagtatttgatgaggtaaacggatttgaagaggaattagccgtagcatttaatgacgtggacttttgtttgaaagtcagaaaagccggatatttggttgtatacaatccgtatgcggaattgcatcattacgaatcaaaatccagaggcttggaagacaccgaagaaaaagtgcttcgattccagggagaaatcagaacattccagtacagatggcatgatattttaaaagaaggagatccttactatagtccgaatttgacattggataagacggattttagtctgagagtctgatagaacaggcagagctgaaaacaggaggacaacatatgagaacattggtaacaggagtcaaaggtcagcttggacatgatgtcatgaacgagcttgcaaagagaggatatgaaggtgttggtgtagatgttgaagaaatggacatcacagatgcagcagcagtagattctgtcattcgtgaggcaaaagtagacagtgttgttcactgtgccgcatggacagcagtggatgcagcggaagacaatgaagaaatgtgccgaaaagtcaatgcagacggaacagagaatattgccagggtgtgcaaagcactggatatccctatgatttatctgagcacagattatgtctttgacggagagggaaccagaccatgggaaccggatgatcaggtgagctgtccgctgaatatttacggacagaccaaatatgagggagaacaggctgtggagcgcctcctcgacaaatactacattgtccgaattgcatgggtatttggagtgaatggaaagaactttattaagacgatgctgaaactcggagaaacgcatgatacgctgactgtcgtggatgatcaggtgggaactcccacatatacgtatgatcttgcaagactgctggtagacatgttggaaaaagatgcttacggaaaatatcatgtgacaaatgaaggcggatatatcacatggtatgaattcgcaaaagaaatttttgcgcaggcaggaatgaatgtcaatctggttccggtaacaagtgaccagtttcctgcaaaagcaaagcgtccgcataacagcaggatggataaatccaagttggaacaaaatggatttacaccactcccgacctggcaggatgctttaaaacgatatctggaagaaatccgttaaaaagaggtgggagtatgaagaaaaaatacgtgtcagggattttgatggccgttgtgttgatgtttgcagttacggcctgtggaacgacagaacagtcagagccggagcaagataaaattacgcaggaagaacaaaacaaagagccggaaaaagagccttcaggggaagtgacagacacaaccgaagaggaagatcaaggcgaagcacagcaaaaaccggaagatacatcaaaagatgagaacaatctgggacctggaacgattaccgtatattcacagaataaggacgtctccggatatgataaaaaggaagtatctttagaagaaatcacacctcagacagtgctctcccagctggcagcagcaggtgtgcttccttcagacaccacggtattaagttttacgaaaaaggagcaggatgccgagcaggtgatcgacctggatctgtcagagaagtttggaagctacatcaaagagatgggatcgtctgcagaatatctggtgattggaagcatctgcaacacatatctggatgtttatcattgtgcaaaaatccacattacagtcaatggtgaaatgcttgcaaccggtcatgctgaatatccgggatatatgacaagattttcttgagaaataaaagagaaaaagacaggattgatgaaatcttgtctttttttttaatacgggagtatgatacaataaatagaagaaaaaaagggggggagtgctggggatggacagagatggaatccggattgagagagagtcctgcagagcttatgtaaatatggaacaaagcggcggtgtatggaaactgcaggctcaggatccgcagctgcatgtttattttgagaaagaaacaaagggcgtacgactgaagtttttgcttcgcctgaaagatgcagaatattttaaggcggcactttattataaaggtgcaggtgaagaattcagtgaagaaagggtatataccttttccttgtttttgaatcaggagatggaaaaggaaatttattttccctatcctgtggaagcaatacgactggatctggcagaagagacagtcacggttgagattgacaaactggaaatggttccggttgattctgaaaacagttttcaagtactgagagaaaatttgggggaactgaacggaacagagaggaccgtactgatcacacatgatatgaatcagagtggggcaccgatcctggcgtatcatatagcacaaaatttaaagcggcgcggacaggatgtggtagtgcttgccgcaagacatggaaatggatttttagaagaaaaatttacgcaggagaacattccggtactttatctgcacgacagtacaagaaatcgggtatcagtggggtggtgcggcacaaacggaaaaatgaaaaatctgagtggggaagagtatctggaagcactgacgtgggttttgagagatgcaggatttgctcatgcaattaccaatacggttgttgccggacaatatgtgcgtcttttgaaagaatacgggtttcagatcatttccttgatccacgagatgaaagcaacaatagaattgtatggatttctgaaagcaggagcagagattgcacgttattcggattatattgtatttccggatggaagcgtacgggcgggctttgaagaattgtatccgagcattgagggggagtgtgccgttcggccgcagggagtctatatgcagattgatgaaccggagaaagagttgtatctatttgaagaatatggcatcccacaggatcagaagatcgtgatgtgttccggtacctgtgaattgagaaaaggtacggatttgtttgttgcagcggcatcgatccttcacagaaccgaagaagaggtgcagtttgtatgggccgggggatttcaggatccaatcctggaagggtggatgcatgatcagatctgcaaatccaatctgtcacagaattttcattttattccgtttattcaggataaaaggaaatatcatgccctgttgagtcgggcagatgtgttttggctgacttccagagaggatccattcccatccgttgtgctggaagcgatgaagtatggaattcctgttgttgcatttgaaaattcaggcggcgtcaacaccatgcttgccagagggcgggggaatctgattccggactttgatgtgcatcagatggcgatgacaacgaaagaacttttcgctcacagacgaaccaggcagtcagaagaagcgaaagcctggatcgaaacagaattaaaatttgatgactatattacatatttgcaggagcttctgcaaaaagaaaaaaaggtaagaacagaatttgatctctatgcaatgacgatgccaaggcagtatgaatattttggcgggggattatccagtgagatgacaaagcagagaatccggcagatgcagtcgataagaccttcaagaagatggaaaggttcagaagaaagtctggtatttctagatacatctgtgggatcaaacagaactacagacaagatgatcgtgggagaatgcagaaaaatatgcagcggactgtttctggacagaccattcctatgtatgccgacttcccatccgggggatgatatgggagtgctaaaagagggaagaaaaattttatgtggcgccaacattctttccggtcagatggaaaaagcaggaatcttgtctttttcagaaacaatgacggaacaccagaacatttgtcttatgggagcgggaattcgggaatttcaaacaggagatcctatcagcagttatacaaaaagtctgcttcagtttttattatgcgggcgaatgctccattccgtgagagatgaaaaaacgaagcattttctggaacaggcaggaattcaaaatgtggtaaggacggggtgcccgtccttatggagtctgactgctgaacaatgcgaaaaaatttcgaagaaaaagggaagagatgttttgacagcattggaaaatcggggcggaagcctggaagacgacagaaatctgctgcggatgctgaaggaagagtatgaaacagtctacatctggatcagagacagagcgaatctggaatatctgcgaagcctgacagatcttcgagagtatacactgattccggggacgattcaggcattacaggaaacattaaatcttgaaagtgtggattatatcgggacacacattcaggccggcatccaaagtctgacgatgctgcaccgaagcctgatcatttccgatctggattatgctcaggcactgcgcaatgagatgcatcttccggtgctaaagcgaagcatgcaaagagaggcagaggcatggctgagtgcaccatatgaaacacatatccttcttccgcaggagaatataaagcagtggaaggcgcagtttatacgcagattaaacagatggtataagaaaaaataatcaggaaggaaagtggttttgcagatcactttccttcctgattttatcgatgcagtactttccgtttcagccagtctgcagcatatccaaaagtatgacggatcagagcccattcaatccggatataattgccgagatggcgtatccggaacggcactttgcggcacctttttataccctgcagtccttctttgattccggatttgtaatcctttccaaatccgatcttgcagaaaaacaaatattttaccagatatcccaaaagcaatgggagaaaattcaggatgagctgtaaaagcggcatgtttttataattgagccagacgctgttgcgggcagagagtttcaccttaaatgtgttgtatttagagccacttgttccgcttccaacatggtatacaagagcggaagaacagaaacagtttttgtagccgtagatcatggcgcgatagccaatgtcgatatcttccaggtaggcaaaatgactctcatcaaagaaaccaatctcatcaaacacgctgcggcggtagatggcagctccggcacaggcagtaaagacagtatcgtccttggtgtaattcgaaatcggccggccggtgcctctgcataccccccatcccatcaacgtatacaggtctccggcgctgtcaatcagatcaggatggtacatttggatcatcttactgcttacggaaaaaatccggtcagaaacttcaatagcacggatcatctcttccacgtagtgagaatctacggttgtgtcattgtttaacaaaatgacataaggggtgtctgcatgccgaatcccttcgttgacagcccgactgaatccatagttggaatccagggacagcacttcgatatttggataggtctgttccatatattccagactgccgtccgtagaagcgttgtctacgaccagaatttgaaaatcccggcaggtctgttcgcttaaagaagccagacatggctccataaaatgttttccgttataattgggaataatgattgtaactttcatgtgctcctcatttctattactgctgtaatttatttcgcgaaagtattatatcaaattcggctttgtttttctatacaaacatatgtttattaaaaattacgaaaatattacggaaaaatgaataaaataaggttaaaataaagtttatgcttgtccattgaaataaagtattgtattatatcatagataatgtgtttctaaaagtaaaataacggaaggtcgtattatgataaaagaaaatcaaaaattattaaaccgcattcaaatcgtattggatgcagttgtgattatcgcagcatatgttttatcctggtatattcgttttcgcagtggactgtttgagttggatccatggtatttgtctttgcgggaatatatgaaggttctgttgtttctggtacctgcatatctggttctgtattatgcattccaattgtatacaccgaagcgggtgcagggaagaaggctggaagcatggcatgtggttcaggcgaatgtgattggcctgatgggtgtgaccatggtatttttcctggccaagctttcggatagatattccagatgggtggtatttattttctgttttgtgaatatcacgatggaagtgttcgtgcgtaacattgtccggatcgttctgcgcaaggcgagaaagaacggatacaaccagaagcatatgattctggttggttatagtcgtgcagcggagcagtatattgaccggatccttgcaaatccggagtggggatatgcagtacgtggaattctggatgatcatcagccaaggggcatggagtataaaggcgtaaaagtcattggcagtatcgataatctgctggtgatccttccgcaaaatcagattgacgaaattgcaattacactgggactcgatgaatatcacaaattggaatatattgtcaatatgtgcgaaaagtcaggtgtgcataccaaatttattccggattacaacaatattattccgacgaaaccttatacagaggatattcagggacttccggtgatcaatattcgtcatgtaccattgaacaatgcattgaataaattcgtaaaaagagcagtggacattttcggcgcaattgttgccattattcttttttcaccggtgatgctggtcgtgtccattttgatcaagctgactgcaccgggaccgttgatctttaagcaggagcgaatcggtctacagaataaaccattttatatgtacaaatttcgttcgatgatcgtacagaaagaaagtgaagagaaaaaggaatggacaacaaaggacgatccgagagttacaccggttggaaagtttatccgcaagacaagcatcgatgagcttccacagttgttcaatgtgctcaaaggggacatgagtcttgtcgggccaagaccggaacgtccgttgtttgtggaaaaattcaaagaagagattccaagatatatgatcaagcatcaggtgagaccagggctgacgggctgggctcaggtgaatggctatcggggagatacttccattcgaaaacggatcgagtacgatttgtattatattgaaaactggacgttgggactggattttaaaatcatcttactgacgttttttaaaggattcatcaacaaaaatgcatattaatacggaggctgatctatgtttcgcagaagagagaagatgtcactgcagcagagaaaaagattgaaccggaaacggcagagacgtggaattgtgtgtttgatcctggaaatcctggtacttgcagttcttgttttagctgcatttatgatgtataagatggaccggctggaacatcgtacattggatgagagcggactggagcttcatgagacaccgaaaggatacacgaatgtggcactgtttggtctggattccagggaaggagaactggatggaggcgtaagaagtgacagtatgatgcttgtcagcatcaacaataagacgggtgccgtgcagatcatttctgtattccgggatacactgctgcagcagcaggacggttcctatgaaaaggcaaatgccgcgtactcttttggaggaccacaggaggctgtagctatgctcaacagaaatctggatctggatattacaaagtatgcttcggtgaattttaatgcgcttgcagatattattgatattctgggaggagtacaagtagagctgaccagtgaggaaatcttctggctgaatggatatacggcagaaacttcccaggtagtgggacgccagacacacacattagacgagaatgcacccggggtttataatctggatgggatacaggcagtttcctataccagaatccgatatacagacggagatgattttaagcgtgcagaacgtcagagaattgtgctgcagcagatgatccagaaattaaagaccgcaggtcccatcaaatggaaccggatcatggatcaggtattgccgcagatatccacgaatctgacaaccccggatattatgaagctgggattgaatattttccgttatcagattggagagaccaaaggatttccgtttgatattacgaccagtgagaatgtaatcggactggaaggatcctatgctgtggcaatcggacatgcagataatgtgcggcagcttcacgaattgctgtttcagcagagtggttatgagccatccgaaaaagtacagcagatcagccaggatgtagcatatctgacaggtgtttacccggaaaactatatgcagtagcgaaagaggaaagggaatgttacaaaaaaaagttgcagacagaaaaattgaatatagttcgtatgtacttgtttatatagccacagtgttggcagcaaaagcacatttggactatgtggcagcaatacttctgatagcagaggcgttatttctatttgtatggaactatagaaagactcaaaatcttgtggatatgcgtggattgtttactctggcatgggttggtggagaggggatcgcatgtttcaaactcagcagacttcagagtgactggagcaatctgacatggctggtttttttcctgatctatttgtgcttcaatttgggatatgatctctggatgggacacttttttaaagaacaggaaagagaggtggagaaagatgcgatttcggcaaaacggatcttaatctgcattgccggactgatgctggtctccatagtctgctttacgctggaagcggtggtggttggttatatcccgctgtttaattccgctcctcatgcgtattctcattttcatatttcaggagtacactattttacaatcagctgtattctgattccggcattgactgttttatacagcaaagttacgagagcgtgttcaagaggcgtgtggatccttttggggttggggaatctgacggcagcagcaattccgattctgtgtgtgtcaagatttcagcttttatttgcagtgggatttgcagttgtgatgtatctgatgctgtatcaaaagattacatggaagatggtcgtcgcgggggcgttgatcatgattccggcatatgttctgctgacagtggcaagacggcatgatgtgacttatttaaatggaatttttgagatgaaaaatgcacagatgccgatctttattacccagccgtatatttatgtggcaaataattttgaaaactttaattgtatggtagagcagctgacggcacatacatggggactgcagatgctgtttccggtatttgcactgaccgggctgaagtttgtgtttccacagctggtggcgattccggactttgtgacaaaagaagagctcaccacactgacaatgttttatgatgcctattacgattttggaatcgttggaacagcggtgtttgcatttgcagtaggagccgcatcagcggcggttgccgggatggtgaggaaaaagaaaaatccgatgacatatatgttttacgggcagattgcaatctatttgggacttgcgttttttacaacctggttcagcaatccgaccacctggttttggcttgcattgacagggatgatgtactggtttgtcggatatcggaagaaaggaaacgaatcacatggaaaacaatagaacaatagatgtgctgattcctacgtataaaccggatcagagatgtgtacagctgataaaacgtctgttaaatcagagtgttcgtgttcataggatctatttgatcgatacagacagcgggattttcccgaaagagttgaatacgctttctgacaaaataaagatttgtcggatttcgccggaaaaatttgaccatggcggaacaagagcgatgggagctgaaatgtcagaggctgaaattctcgtttatatgacacaggatgccatgccggcagatgaattcctgatcgagaatctgcttgcaggattttccgatgaaaaagttgcagcggtttatgcaagacagcttccggctccggattgtcattttattgaatgttatacaagagaatttaattatccgcgggcaagcatgctgaaatcaaaggaagatcttgcaaaactgggaatcaaaacttatttttgttccaacgtttgcgctgcatacagaaaagatgtttacaaaaagctgggaggatttgtcaaaaaaacaatattcaatgaagatatgatccttgcaggaaacatgatccagaacggatggaagatttactatgcggcggatgccagagtgattcattctcacaattacaatgctttgcagcaatttcatcgcaattttgatctggctgtatcacaggcagatcatccggaagtttttgacggcgtgccttcagaaggagaagggatgcgcctggtaaaggatactgcaaaatatttgttcagatccaaaaagccgtggcttttgattccgcttgtatggaaaagtgcatggaagtatctggggtataagttgggaaaaaactataaaaaactgcccaaatggttggttttgaagtgtacgatgaacaaaaggtactgggaagtgacttgaaattcacagttttttcattgatgtttccaggaaaatattgtatgatgttaaagtgcatattttaggcaatctacaatgtatgccatgagaaaggatagaattatgggagatacgagaagacgttcgaatccggagccttccagatcggacagaagaagttcccaaaggtcggggcagccgcgccgccgcccggaacaaagaaatcagatgggagacggcagggaaagagcgcaaagacaacgttcagctcagaaaaagcgtacatccgacagcagtgctgtcaatcgaaatcgttctgtaagcagcagaactccccagaagagacgttccagaaaacgtgcaaagagaggatttgcatcctggtctgcagggaaaaagacggttgcagttttgctgggagtattgatcctgttgattacagcagcaatcggagtcgtagcagcaaaatggggaaaacttggaggggtagttctgaacccggacaagcttgcgatttcagaagaagcagaaatcagcggaagcggttatctgacagttgctttgtttggtcttgatacaagagcaacagatgaagaaatgggagcacgaagtgataccattatgatagccagtctgaatcgggaaaccaaggaaattaaactggtctctgtatatcgagatactttgatgcagctttcagatggaacttataataaagcgaatgcagcatatgcgtttggcggagaagaagaagcagtcgcaatgctgaataaaaatctggatctgaatatcgaacactatgtgtccgtagacttttcggtgcttgtacatgtgattgacgccctgggaggaattgatctggatatagaagaagctgagaatggaatggatattatcccatatttgaataattatgttgtagaagtcattgaaaatacaggagtcgattccggaccgtatacacaactggggccacagcatttgaatggtgtacaggcaaccgcatatgcacggcttcgatatggcggcggagatgattacaagcgtacagaaagacagcggaaagtaatcgaacagattatggtaaaagcgcagaaagcaaaactgtctacgatcaataagatcatcgataaggtgtttgacagtgtaaagacgaattttacattgacagagacgattgcttatgcaaaagatgtgaaagcatataaatttggagagacccatggattcccgtatgagagcacgaccgcacagttggatgtaggagactctattattacgacagatttgacgtcggatgtgataaagctgcatcagttcttgtttggagaagaggattttacaccgtcctccacagttcagagtatcagcacagaaatttcaaattcggcgtatagtacaggagaatcttacgatacagagtatagctcggggtattcgggatatgataccggttattatgacagcagttcctgggacagcgggtatcaggacaatacgtatacagaagatggatatacgcaggattccggaggaaattatagccctccgtatgaagatggaatgacggatggcggaacacagcttccagatggagaattcagtggcggaggcagtgaagaaaatctgcaataaaaacgagcagccattgtttcatagaaagaaatgtcaagagacagaaaagaggagatatacatgaagtcgttgaaaaagataggggttttgttatttgcagtatgtttttttgcactttccccttccgtgtttgtacatgctgctgatggaacgcttcagttttctgatcctacaggaaaagtgggagaggatgttacagtcaaggttaagatcagtacaagtggtgagccgatcggagatggatttgcaaccgtaacgtatgacaaggatgcattggaatttgtaagtggaacaaatgcttccggtgcgaatggcacagtcaagctggaagcaacaggagatggaaccgtatcggagctggaatatacactggtattcaaacctttaaaagaaggcgagacaaagctggaagtggcagaatatacatcgtatctgtattcagatgaaacgttaaatctggcgacaggaaattccacaattactgtagaagcaggagacggcggagcgacagagaaagcagagggcgtaactgctgttacaacaggcagctgcagtgtagagattgatggagtcacatatgggatttacaatgatttttcggatgcacttgttccggacggatgcagcagaacaaccatggattacaatggagagactgtgaacgcaattttgcaggatgtatctggaaagtacttcgtgtatttgacagaagaagataaagatccggtgatggcactttacaatgaaaaggaaaattcatttgtgattacagaaatggtgtctatcacagattccagttatatctttttgttggggacaaatgatggaaaaggattgccggcgaacttccaaaaaacaaatctgactgtgggaacgctgacatttccggtatggcaaaattcagagagtgaagatttctatctgatgtatgcaatgaatgaattgggagaagaatccttctaccagtatgatacaaaagatgagacatatcagaggtatccgattgtagaggtaaaagaaaagaaaacgacttcatcaggaagctggatggataagattcagaaattccttcgggaccaggttctgatcattgtggctgctgcctgggcagtgattctggttctgatcattgttgtgattgtactggggacaaaactgcgtaagagaaatgaagagctggatgagctttatgatatacaagaggttgcctctttagattcgagagaaaatcgcgcagtaactgccaaaaagtcacggaaacagtttgtgggttatcaagatgacgaagagtttgaagaagatgacgaaacagacgatgattatgaagagtatgatgaggaggatgaatacgacacatacgatgatgattcggatgacgatgactttgaagaatatgacgatgagtatgaagacgatgattacgatgagtatgaagacgatgattacgaagagtatgacgaggacgattacgaagagtatgatgaggaggaagaagatgttccttcctatcagccaaagcgatcatcttccaatcgggaagatcaagaaagctatgatgtagattttatagatttataagaaattggggcaaacacagaaacagtctgtgatatgccccaattttttttataaatagtcacctaaggagagtaacaggaggaaaaattatgtgtggaattgttggatatgtaggagaaaagcaggcagcaccgattttgctggatgggttgtcaaaattggagtatagaggatatgattctgctggaattgcagtctatgacggcgtacagattcagatggaaaaatcaaaaggccgactgaaagtgctcagcgaactgacccatgacggacagacgatgcccggaacaatcgggattggacatacaaggtgggcaactcatggggagccgtcagatgtgaatgcacatccacattataataaaaacaaaaatattgtagtggtgcataatggaattattgaaaactatttaaagctgaaacataaattggagaaaaaaggatatgaatttgtgtcagagactgacacagaagtgctggcacatcttctggattattattatcagggaaatccgctgcaggcaatcaccaaggtgatgcatcgagtggaagggtcctatgcgcttggaattttgtttcaggatcatccggatgaactttatgcggtaagaaaagacagtccattgatcgtaggagaagcagaaaatggatgtgtcatcgcatccgatgttccggctgtgttaaagtatacacgggatgtgtattttattgaaaatgaagaaatcgttcgaatgaaaaaggaatctatggaatttttcaatgtagacgaagaaaaaattgaaaaaaaatccgaacatatcgaatgggatgcgaatgctgcagaaaaaggcggatatgagcattttatgttgaaagaaatgtatgaacagccgaaggcgatcttagataccttttcgccccggatcaaaggaaatgatatcgtaatcgaagaacttggaatgtcggaagaagaaatcaaggcgattcgtaagatcatgatcgttgcatgtggatctgcatatcatgcaggagtgactgcgaaatatgtaatggaaggtatggcgaggattccggtagaaacagatctggcgtctgaattccgatacaggaacccgatcatggaggatgggacactggttgtgatcatcagtcagtcaggagaaacagcggattctctggcagctttgcgtgaggcaaaggaaaaaggtgcaaaagtgcttggaattgtcaatgtggtgggaagttccattgcaagagaggcagacaatgtcatgtacacatgggcgggaccggaaattgcagttgccacgaccaaagcatattccagccaactgattgctttgtatttactggctatgaaatttgcttttgttcgaggaaatattacagagaatgaactgcaggattatattgaagatattcagaaactgccggaacaggtagaactgcttttgaataataagaatcggatccagaagttcgcaaatcgttatcttgccgcaagggaagtgtttttcatagggcgtggaattgattatgcgatctccatggaaggttctttgaaattgaaagaaatttcctatattcattctgaagcatatgcggcaggagaattaaagcatggaacgatttcactgatcgaggaagggacacttgtgacagcgattctgacgcagaaggatctgtacaaaaagagcatcagcaatatagtagaggtcagaacccggggggcatttgtcctggcgattacaaatgaaggaaatcacgaagtcgaaaaagcagcagattacgttgtatacatcccgcaaacaaatcggtatttcaccaactcactggcgattattccactccagctgtttggatattatatttctgtgggaagaggatgtgatgtggataaaccgagaaatctggcaaaatctgtgactgtagaataaaatttccctgtttcaaggtttgttaaaggattgaacacagttttatcacaaaaggacggtatgatagcagtataaaatacaagagaaagaaggaattgatatggaaaatcagtacaattattaccattctgaagaaccacagaatgattcattttataatggtcagccgaatccggagcaccctgaaaaacgtagaaagaaaatgccgaaagcagttgtagtgacaggatgtgcactgctgtttggagttgtttccagcgcgacgtttctgacaaccaatatgattggaagcaaagtattgggattggaacaaaaaacaaccaaagaggtttcaaatacaacacagaataaagcgtccctgtccaaaacctccagtgtgatcacatccgatgtttccaatgtcgtagactccgtgatgccatccattgtatccattacaaatatgagtgtgcagcaggtgcagagcttctttgggggaacttcgcagcaggaagtgacaagtgccggaaccggaatcatcattgagcagacggattcagaacttttgatcgttacaaacaatcatgtggttgcagacagcagtcagctgacagtgacatttgatgatcagagcagtgtggaggcagatatcaaaggaacagatcccgcacatgatctcgccgtgatcgcagtacagctggataatatttcagatgagacgatggataaaatcgcagtggcaacccttggtgattctaccaagctaaaagtaggagagccggcaattgccattggaaatgcactgggatacggtcagtctgtgactacaggagtgatcagtgcaaaagatcgggagagccgtacaacagatgctgcaacaggacagacaaccgaatcttcagatgtaaaactgatccagacagatgcggcgatcaatccgggaaacagtggcggtgcgcttgtgaatgccaatggagaagtgattgggatcaattcggcaaaactgatcggtagtgatgtagaagggattggatatgcgattccgatttccgatgtgtcagatattatcacgaatctgatgaatcaggagacgaaaaccaaagtttcagaagcggaaagaggatatcttggaattacaggtctggatgtggaagaagcagattcgcagcgttatggaatgccgacaggcgtttatatttcagaagtatcccgcagaggaggcgcagagaatgcaggaatcacaaagggaagcatcatcgtcggattcaatggaattacaattgacggtatggattctttgcaggaacagctgcagtattataagaagggggaaactgtgacactgacccttcaggtacctcaggagggtggagaatataaagaacagacggtggaagtgacactgggaaataaagcacaataaccaacagaagtccgggaaagcgtgtagaatatctgcacgctttgcctgcgtcacagggacaacaaaatggaaaaagtaaaagagatgttgaaaaatgttaagaaatgtattatagttgtaaaagattaggacaaaggaatgtagtataaaaatgcaaaaatataatctgaatataagtaaaaaactgcatattttagggggggggtataccactctgactttgttgagatctctgaatacagaggtcttatttgcgttaccagaaagacacttgaattgacatgagtattgtcaatgaaagtgtcttttttgttttttgagagggattttcaggggaatggaatatgatggaacagaaagaatataagatacagattgtagtgctatcgcttttggatattgcaggaatcatgattagctttttaagcgcaaattatattagaaatcgtaggttctggtatgagaacattgacatagaattgtctaccgcaatattgtacatgatcttgctttatttgttgctggcctttttgaaaaattcaaaacaggattttttcaaacgaggaccatgggaagagctggtggaagtaacagctaaggtgacacaatatacagcacttttgattgcaagtatgttttgttttaaaattgcgtccgaaatttcgagaatcgcttttttcttattttacttttttgcgattacccttgtttttgtattccgaagtatttacaaagggtttttattgcatgttgcaaaaaaaagtatcaatacaaagcgtctggttatcttgacaatggctgaaaatgtagaggaaataaaaaaacgtcttggcatggacgagatgtggaactatcttttaaaaggcctgatcctgctggacgtgccggacaaagcagttggaacagaatgctgcggcattccgattctgggaaattataacaatatgtatgactgtgtcactcaaagagttgtggatgaaatcttcattcatattccctattcggaagggattcatgttgccaaggcaatcgaacagtatgaggcaatcggaattgctgtgaatttgaatcttcagatttatgatgtgaatttaaaatgcaaatccaaagagttaagagcttttggggattattatgtgatcacattcaaagagagcgtttccagtctgaaaatgagagtcattaagcggatgatggatattgcaggagcaatcgtcggacttgctgtcactggagttgtgttgatatttcttgctccggttttgcttctggaatcaccggggccgcttatattttcacaggtgcgggtaggactgaacggaagaaagtttaagatgtataagtttcgatctatgtataaagatgcagaagaacgaaaaaaggaactgatggcacagaacgaaatgaaaggcctgatgtttaagcttgaaaatgatccgcgtattacaaaagttgggaagtttatccgaaaaacaagcattgatgagcttccacagttttggaatgtgctgaaaggggatatgagcctgattggaacaaggccgccaactctggatgaatttgagcagtatgaaacattttataaaagaagactcagtatccgtccggggatcacgggaatgtggcaggccacaggccgcagtgacattacagattttgaagaagtcctggcgcttgatctggaatatatagacaactggtcattggggctggatatgaagattttgttaaagacagtgtttggagtgttcggaggaaaaggagcaaaataaatgcaaaatcagatgaataaatatcgaagattgaaaaatctgtttttgaggcaaagctatctggatgcctgggaagattatcaaagaagtattttgaaaaaaagttttccgaagtgggattatattgtcctgacagcgtccaatgaagagcagggaaaggcattccaaaagcagatagaatatagaagtgaaaaaggtgtgctgccagacgccacaaaatttctggtaattccagatccggatggaaaacggattggttccggcggcgcaacgctgcatgttttgcggacgctttctgagcgggaaggatttttgggggattttcatggaaagagaattcttgtgatacattccggcggagacagcaaacgtgttccgcagtattccgtatgtggaaaattattctctccggtgccaagggaactgccggatggaagaggatctacgctatttgatgaatttctgatcggaatgtccggagtcccgtccagatttaaagaggggatgctggtgctttccggagatgtgctgctgttgttcaatccgctgcagattgatgcacagttttcaggtgctgcagctatttctatgaaatcaccggctgagattgggaaagatcacggcgtattcttaaacgacggaacggatcacgtcaaaaaatttttacataaacaacctctcgatacacttttgaacttaggcgctgtcaatgatcagggaaatgtagatttggatacaggcgcagttttgtgtgatgcaaatcttgtatcggcattattttcattgatctcagaccacggagaggtaaatgaaaaaaaatatcagatgttcgtcaatgaacagtcaagaattagtttttatggggattttttatatcctcttgcgtcagattccacactggaacagtattataatgagcagccggaaggaacttactgcgaagagctgatggcatgcagaaaaaaaatctgggaaacactttgcaaattccagatgaaattggtgtgcctgtcgccggcagagtttattcattttggaacaacaacagaacttctgaaattattgacagaagagatcaatgattatgaatttctggactggagacccaacgtatttaccaatacacagagagtggaaagcgccatccatgacgggctgctggaaaaagacgtggtattggaagacggatgttatattgagagcagctggcttgcaggcagtacggtcgtaaaaaggggggcaatcgtatcccagatgatcctgcaggatatgactgtgccggaagacaccgtgtggcatggaatccgtctgaaagagcaaaacgcatatcttgtgcgtacgtatgcagtgacggataatccgaaaaagaccctggaagaaaacgcaggatttttaaaagggacactgcagacgtttttagaagataacgggttatgtatagatgatctgtgggatacacaggatcattctctttggaatgcaaagctttactctgcacatcctgcccaagatcaggcggccgaggaagcgctgcttttgtggaagatgagctgcaaagaggcagaagaagaggaagtttgtgcatggaaggcaagaaaacgatatagcttgtgtgaatcttttgcacagggagatactgcgcattttgtagaatggaatgaagaactggaaaacagaatcctgatcgaacgctttttaaaggcactaaaaggcggagaaaattatattgcggcattgaaaatcttcggtgaagaagaattgaatgaaaagcagtatgaaattttaatggaaaaagcagatcatatggaattttcagagaaaatcagagtgctctatgcaatttcacgctccatgaaatatcagtcagtcgcatttcatggtgcttcatatgatctggtggaacagaaatgtttttcagaaatacagaagatgttgtttcagaaaagttttattcgtcatgcggcagattataagatcgcaaaagaagtagtacagataaaacttccggtccgggtaaactggggcggcggctggacggatactccgccatactgcaatgaaaacggaggagtagttttaaatgcaccgattttactcaaaggagaaaagccaattgaggtggaaataaaaaagatcccggaatatcgaattgaatttgcaagtctggacttttatgcatatggaaaagtggaaacggtggaagaaattcaagactgccataacccatatgattcatttgcgttgcataaagcagccttgatcgcctgcggagtgattccgcttgatggacatgcagagctgagagaaattttgaaaaaaatgggcggaggcttttatctgtccaccaaagtttgtaatgtaccgaaggggtcaggacttggaacaagcagtatcctttccggggcctgtgtgaaagccatcggagagttcctggggcagagctggtcagacagccaggtgtatgaactggtcttgaatatggaacagattatgagtaccggcggcggatggcaggatcaggttggcggcctgactccgggagtaaaatatattacttcacgtccggggatccgacagaaattacatgtgacttatctggaattggatcaggacaccaaaaaagaactgcaggagagatttgtactgatctatacgggacagaggcgtctggcaagaaacttgctcagagaagttgttggaaattatatcggcggaagaagagaatcgatcgaggctttaaaagaaatgaaacgcctggcagtgctgatgcgatttgaattggaacagggaaatatcgatgcattcgcaaagttattgaatgaacactgggaagtatcaaagctgctggatcagggatctaccaatacctgtattgatcagatctttgagtcctgcgaggacatgatcgatggaaggtttatttccggtgcaggcggcggaggatttcttcaggtcattctgaaaagaggcgttaccaaagaagcactgcgggaacgattaaaacaagtgtttgaggattcaggcgtagatgtttgggagacggaatttgtctgggaataaaatgcaaaatgagaggaaagaaaaatgaattatatcagcagaaaaataggattatgcatatgtgcagtacaactgatcgcatcggcagtgttttttgtagcgctgtggcttatgaatttattgccggcaaaatatgtcacaataatcggactggtacttctgcttttctttgtatgcgtggtatccacacagcttctttctaaaaagaagggaattgcgggaaaagtaatcagtattttattaagcattgggctgattttcggatcctattatatttttaagacaacaaatgtaattgaaaatatcagtggcggagatacgaaagtcacgaaaatggtggtagcggtcaaggaatcggatccggctgaaaaactggaagatgcagcatcgtatcagtttggtgtgcagtacgcattgcagcgttcggatgtggaggcagcagttgcaaatatcaatgagaaactgggaagccagattgcggccgtggagtatggatccgttgcagaacaggcagcagcacttcacagcggcgaagttcaggcaattatctacaatgatgcatacagccagatgttggaagaagggcttggcgaggaacaggaaaactttaaagtcatctatacatatgaagtgaaatcgaaggtagaaaataaagcagcacaggtagaggtaaaagatgagacatttaccgtgtacatcagtggaattgacgtgtacggtgcgattgaaacgaacagcagaagtgatgtgaatattctggcagtcgtcaatccaaatacacatcaggtacttctggtgacaactccgagagattactatgtgcagattccgggaatttccggagatatgcgggataaactgacacatgccggaatttatggagtggatgcgtccatgtctacgttggggcagttgtataatacaagcattgagttctatgcaagagtgaactttacgtctttggtagaaatggtagatgcacttggcggaatcgatgtgatctcagaacaggcatttacaacaagtgatgacagtggactggttatggatgtaatccagggagaaaatcatttcaatggagaacaggcactggcatttgcaagagaacggcaaaatgtggatggcggtgatttccagcgtggaagaaatcagcaggctgtgattacagcgatgatcaagaaagcaatttcaccggcgattttgaccggagcaaatggtctgcttaacagtgtcagtggaaatgtagatacaaatatgtcaacagagcagattcagacattggttaaaaatcagctttcagaaggcggagcatggaatatcaaatcaatgtctgcagaaggaatgggagatacacaggagtgcttttccatggtgggaacaccactgtatgtcacacagccggatcagaattcagtggcagcgattcagacagcaattgctgcagtaaaagccggagaaacattttcggattcagaaatcgcacaataaagaattgtgagaaaggacagcgcggtaaatgatgagcaacaagataaatgtaccgttttcgccgccggacattaaagaggaagaaatacaggaagtcgccagagctttgcgaagcggatggatcacaaccggaccaaggaccaaggaatttgaaaaacaaattgcagaatatgttggaacaaaacgggcagtctgtctgaactctgcaacagcatgtatggaaatggtacttcgtgcaatgggaatcggtgcgggagatgaagtgatcacaactgcatatacttacacagcaacctgtagtgcaatttgtcatacaggggctgtgccgatccttgtggatactttgccggattcctatgaaatggatccgcagaaggtgagagaagctgttacggagcgaacaaaagcggttatttgtgtagatcttgcaggaattgtgtacagcaagtacgatgagatttttaaaatagcagaagagaaaagagcactttttcatgcaggctgcgaacggcagaaaaaactgggcagaatactggttatggcggatgcggcacatgcatttggagcatcacacgaacataagatgtgcggccagatcgcagactttacctgttattcttttcatgccgtgaaaaatctgacgacagcggagggcggtgcccttgtatggtcagagcagatcgaacaggcggggatagacggagaagaactctataaagaatttatgctgctctccctccatggacagtctaaagatgcattggaaaaaacaagagccggagcctgggaatatgatgtgatcgcaccttacttcaaatgcaatatgacagatattacagcggccatcggcctgtcacaattgaaacgttatccggaaattttgcatcgaagaagaagtatcatagaaagatatgatgaagcatttaagcagtacccgattcaggttttgaatcattacgatacggaccatatttccaatggacatctgtatttgacaagattgccgggaaagacaagagaagcgtgcaatcagatcattttgcagcttgcagagcagggaattgccagcaacgtgcattataagccgcttccgctattgacggcttacaagaatatgggatttcagatggaagattatcccaattcttatcggatgtttgagaacgagatcacacttccgctgcatacgtgtttaagtgatgaacaggtttcgtatgtgattgaaaaatttacagaaatattgaggaagaatcagtaatgataaaatgggaaaacttaccggagcgaatcaaaaatgaaaaaacttatccatattatgaactgctgcagcaaaagaaaatacaaattttatggaaaagggttcttgattttttttgtgcggttgttttgactgtactcctatcgccggtgatgctgctgattgcagcggccattaaactggatacgaaaggaccgatcttttacaggcagacacgtgtgaccagatatgggatgacctatcgaatttttaaatttcgaaccatgattacaggtgcagataaaaaggggccgcttgtcaccagcagtcaggacgatcgtgtgacaaaagttggaaaactgttacgaaaaattcgtctggatgaactgccgcagctgttgaatgtgttaaaaggtgagatgagctttgtgggaacacggccggaagttgagaaatatgtcgatcagtattcggaggagatgatggcgacgctgtttctcccggcaggtattacatcctatgcaagtattatgtataaagatgaagatgaacggattggcgcatatcagaaacaaaccggaaagagtgtggatgaaatttacagagaatatattcttccggaaaagatgaagtacaatctgaaatatctgaaggaatttagtatctggagagatatgaagctgatgctgatgacagtagcagcggttttaaaatagcagtttggaagaggaatgagaatgagcaaagtagcagtgattaccatgggagtaaaattggacggcgaaaaaggatacacaagatttcggtatttgtgtgaatttctcgtgaaaaaaggatacgaagtagatctgatcacgactacctttcaacattgggaaaaaaagcaaagggatctggaatctgttgaccagaaaagctacccatttgggatcaaatttatatatgagccgggatatcggaaaaatattgatttgagaagagtaagaagtcataaaattgcagcagaaaatttaagaaaattactggaaaaagaagggaactatgatctgatctatgcagaaatccctccaaatgacgtggcacttgcagcggcagagtatgcgcatcgaaacaagatcccgtttgtggcagatgtaaacgatctctggccggaagcaatgcgtatggtttttgatattccgatcgtcagcgatcttttattttatccgctcaaaagggatgcagaaaaggtgtattcgctgacatccggtgtcattggaacatcggacgaatatcgtgacagaccgcttttaaatcaaaagcgggatgtgttaaaggaaacggtatatgttggaaatgaaatttccgtatttgacaaagaagcagaacagcatgcggatgaagtacaaaaagaggaaggcacattttgggtgacatatgcagggacaattggaacgagctatgacattcgtaccatggtactggctgcagaggagttgatgaagcagggaaaaacgaagatccggtttcagatactgggagacggtccgacgagagagatgctggaaaatctggcaaaagagcgcaagatccaaaatgtaaaatttacaggatatgtgccgtacgaacagatggcggcatatctggtgaaatcagatgttttgatcaattcgtttgtgcgaaaggcaccgcaaagtattgtcacgaagatcggagattatctggcggcgggaaaaccgatgatcaatacgtgtatgagtccggaatttcgaaagaaagtggagcaggacggatttgggatcaatattgagccagaagacgtcagggagctggtaaatgccgtggagtggatgtacgaaaatgaggcagaaagaaacgacatgggaaaccgggcaaggaagatcgcagaagaacagttcgaccgaccggtatcctatgggaaaatagaagcaatgatcagcagtctgatcacaaagagaaagtaaaggcaggataaaaatgagaccggtatttagtgtggtgatgccaacatatggtgtagaaaagtatattgagaaagcaatccgaagtgttcaggcacaaacatttgaaaactgggagctgcttgtgattgatgattgtacttgtgatcaaagtgcagagattgcctgcgaaattgcagaaacagattctcgtatccgcatcgtacatcacgaaataaatcaggggcttagtgctgcaagaaacacagggatccaagaggcagtcggagaatatatctggtttatggatccggatgattgggtggaaccggaattgatgcaggctgtagcggcatcgttggagaaaaaccgtgcagaaatggttctgtttggactgcaggaagagtattatgctccggacggacacctgcagtattcccatccgatctctccgacagaacagtattttaccactcaggaaacattgcggaaagagttcatccggctggagcagcagacgctgtatggatatgcctggaacaaattttataacctggattatctgagatcacagaatctgtggtataccgatgtgaaattgatcgaagatatcaaatttaatgtcgaatattgtatgaatattcaaagaatgaatctattggcaatcacaccgtaccattatgcaaaacgagtggaaatgaacctgacaaacaaatttgtggaaaattattatgaacttcacgaatggagaattgcgatgatattcaatcagtatcgcagctggaagcttgatgatgagaatgtacgggcaatactgggcggattgtatggaagatatattctttccgcactgcagagaaactgcagcaaagaagcaaacatgtcatataggatgcgaaaaaaatggtgcaggaatttgtttgaaagacctttgttccgggaattgataccgggagcgaaagcgaaggacagcttcagtttaaaaattgcgttgagatgtctgaaatggaaacaggttgggctctgtctggttttaggaagaggaatctatctggtcagagaaaagatgccggtactttactccaaagtcaaggcagaaaggtaaaaaatgatgacacgattaaggcgatacgaagagaacgtagaattgatctttaaaattttatatttcctgctcgcagcaggaacattttgcccgttcatttacgattcatcgctgcagccaattctggtgaaaatggtgctgggagttggagggattcttctatttctccgggcagcggattggaagcattacattcgtatgccgggactgtcgtggatggcgttgttcgttctgagttttctattgtcctcctttatgaacagaaaatatggaatgtctgaaaatttcaaatggatgatctggatgatcttgcagatgggatgtttgtatacttgtaagctggatcggagcagggaatcttatgagaaggaatttcggattttatcccatgtgatgctggggtacagtatgatcgcagcaatatgttctttctggcagctgcttcagggaaccgcactgaagtggaccacacaaagtggtgaagtcatgctgtcaggataccactggggaaggctgtggggcatttataccgatccaaattacggtgcaggatttcatgccctttgtacattgatggcgttgtactttttttggaatgtaaaaaaatggtggagatacatctatctgtttccaatgctgctttctgtgctgtacatcggattttcagattccagaaccagtgcattgatgttgtgcgcaggatgtggtgcgtattttctgttcactcagatacagtcagcagataagaaggatagaacaaagcgggggattgcaggagggctgatgatcgcagcggcagtgatcctggtattttccggaatgcatctcatgaaaaaagcatacaatcagcagcaggtacctgtggcagaaaatacgcaggcggtggatccggtgcagaaaccacaggagatacaaaccgggagagaacaggatctgcagaaggacgtcagcaatggccggattcagctctggaaaagcggcattgagatctggaagacatctccggtatatggaacagggtattccacggtggtggattatgcaaaggagaacgtaaaaggaacatacattatagaaaattcgcagggagattaccacaatctccataatcagctgatcaatgtgctggtgtatcagggaagtatcggggcaattttgcttgtaggaatgtttctctatttttgccggtatatttggaaagcatttcaaaaatccgggataagaaattacgacgggatgctgttatgttccattttgatgatattgatcgcaatgatgtttttactggaagggttttataccaattcgccgggagcatgtatattctgggtatttggcggatatctgatccatggaatttatcaggatcaagagcagacagtgaaataaaggatgtagtttatgaagaagaaaatactggtcggctatattatggatggaacatccggaggcattgatcgctacctgcttcgatttatagagcaggtatgggaagaagacattcagattgattttttgagtgaccgcagtgcatacgagctgaagaaaagattagaaaaatataaaagcagagtgtttcaggtatccagtttatggcatcctgtgacacagtatcggcagacgcaaaagattatccaagagaacgggtatgatgttgtatatttgaatatttcaacagcaatggattttattggcgcaaaagctgcaaaagatgccggtgtgaaggaagtgatccttcacagccattcgggtggaaatgactgtgggaatgtctgtaaaagactgttgtatgacgtactgcacaaaatctgcagaacctttttattccgtctcggaacacggcattatgcctgttcgaaatcagcaggatactggatgtatcccaaacgaatcgtagaatccgaagcattccaaatattgtataatgcagttgatatggagtattaccggtatgatgaagagatgagaaaacaagtgcgcatggaaatgcaggttccctggacagatacgttggttctcggacacgttggaaatttctgttatcagaaaaaccaggagtttctggttcgggtgatggctgaggttttaaaaagatgtcccaatgcccggttatggtgccttggaaaaggggaaaatgagcaaaaaattcgaaaattagcacaaaagtttcatatagaggaacagatacggtttccgggacaaaaagaagacatcggatcttattatcagggaatggatgtttttgtactgccctccagatttgaaggacttcctcttgtagggatagaggcacagtgtatgcagctgccgtgtgtatttagtgatgcgattacaaaagaagttcagatacaggatcactgtgcgtttttaagtctgcataaatcaccggaaatctgggcagaagagattttaaaaatatccaggtatgacagaacgcaggtgcagatgacagaacagatgaagtgctatacattggaagagcagagaaaacagatgaggagatggatatgtctttggtaagtattatcgttccggtatataatgtggaaccatacattgaaacgtgcatacaaagtttgattcggcagaccatggggaacatagaagtgattcttgtggacgatggttcgacagaccgaagcggtgagctttgtgatcaatacgccgaagcagatgaaagaatccgggtcatacataaacagaacggtgggctgagttccgcaagaaatgccggaatttcggcagcgaagggggagtatctgctgtttgtggacagcgatgattatgtgtctgcaagcctggtggaaaagacggtgtcatgtgcagaacagaatcaggcagatgtggttgtctttgactatcaggaaatcgaattgtgcagcggaggaaaacaaacaagaacatctgcattgcctgccggacaggtcatccatgcagagagtgttccacagcttctgctgatcactccatctgcatgtaacaagctgtataaacgcagtttttgggaaatgacacagattgtctatccggagggaagaaactttgaagatctgtcagtcattccgcggattttgctgcaggcgggacgggtcgtatatttggaaggagatcctttgtatttttacgtgctcagagaaggatcgattatgcggagcggagcttttgaaaagggctgggaagagcgaagaaaagcaatttcggatgtaagaaatctgctggaagaaaaagggatggaacaacagtacaaaaaagagctggaatatctggcatttgagcatttatattttgtaccatccaaagaagtggtgttaaaggacagaaacaatccgtgcctgaaagagtggagatcgtatttggatcttcagtatccggattggaaagagaatccctatatccgacagttatcaggaaaagacaaaatccttttatttctgctcaggcacagatgctatgcaggaatgtgcatgttgtctgtactgcgaaaagggatggacaggctgaaaaacaagtaacaggagataagaatggaaaaagtgttaacagttgtgattccatcgttcaatgtggaaaagtatttgcgtcagacgttggaatccttgagaaatgaagagattctggaagatgtggaagtgttgatcgtagatgatggttcaacagacggcacagcaaagattggaaaagaatatgagaaacgttatccgcagacctatcgggtgatttccaaaacaaacggaggacacggttcaacaatcaattgcgggatcgaacagagcagaggaacatttttcaaagtcgtggatggagatgactgggtcaatacagaggcattgatcgaagtggtgcgcagactgaaaacatgcggggccgactatgtggtgacagattattgtgaagtgaatgataagacaaaagagcaggtgagaaaacagtttcctgcattggacgtctgcagagaaatccgatttgaaaatgcggcagagaaggtgcagatacctatgcatgcgctgatcatcagaacggatcttttaaaaacacatcagatccgtttggatgaacattgtttttatgtggatgtggagtatgtgctgtttccggtaccatatgtggaaaccgttgtatattatccggagcctgtttatatgtatcgtctggcacaggaaacacaaagcgtgagcatccggggatatcaaagacatatacaagatcatatccgtgtgatttttcatctgagccaattttttgaggaataccgggaaaatgcaggaaattcagaaaaaacggcgtatattgccagacggatcgcacagatgatcggagatcaggttaccatttttttgagctttccggaggaaaatacggagacacagaaacagtttctggagtttgacagacaattgaggaaaacgagcaaaacgatctatgagctgtccggaagagaaagtgggacacttcgccttttgagaagaaccggattcagggggtatcggctcattcggaaactggcaagaaagagaaacaatatggaggaataaatgaagatacattctgtcaaatacaattttatcatgaatgcgattctgacagtggcgggaatcatctttccgctgatcacatttccttatatttccagagtgcttctggtagaaggaagtggaaaagtagcatttgcgacatctgtggtcacatattttacaatgtttgcctccttgggaatcccgacatatggggttcgggcatgtgcgattgtaagagacaacaaagaaaaactctccaagaccgttcaggaattgttgatcatcagtggaggaacaacatttctgacgtacattgtgtttggaatttccctgtttgtcataccggagtttgcacaggagcgaacactgcttctgatcgttggacttggtatcggactgaacaccataggagtgcagtggctgtataatgcactggaacagtattcttacattacaacctgttcaatcttatttaaagtgattgggatgatcctgatgtttttactggtgaaagagagctcagactatcagatttacggaggcgtatatgtcatcgcatcctttggatcttatgtgctgaactttatccgtcttagaaagtttgtgacatttcagaagaccggtacctatcagttcaaacaacatttgaagcacatcatggtattttttgccatgtcagccggtgcaagtatttacctgaatctggatgttgtgatgctgcgttttttgcagagcaatgaagcggtaggatattataatgcaggaattaaggtaaagacagtcctggtgacatgtgtgacatcgcttggaaccgtgctgctgccaagattatcctattatattgagacagcggacaaaaaagcgtttcagctgatggtgggaaaggcatttcggtttgtatttgttgctgcaagtgcagtgaccgtatattttagtatttttgccagagaatccattttgctgctctcaggtgaggcgtttctgcctgcagtcggtccgatgatgattttaatgcccacggtgcttttgatcggactttccaacgtcactggaattcagattctgactccaaatggacgagaacgggaagtcatgtattccatctggggtggtgcgattctggattttgtgctgaatctgatcgtgattcctaaattttcagcaaatggagccgctttgtcaacacttttggcagaagggatggttcttctgcttcaatgttggttcttgagagatgtgttgtggagttatatccggcaagtacaatgctggaaaatcgtaattgcactggcagtggcatccgtaatgacgattcctgttaagatatggatcgattccggagtgtttgtaacacttcttgtatcggcaatcgtatttttcggaggatatgcagtggttcttctgttcctgaaagaaccttttgtatctgaaattctaaactcggggattcatgcgattgtccgaaaaaaatagacgatgaaaagagagagatacagatagagtgagggaaaatatgaaagagaagttactggaaaataaaaagaaagtactggaaaatttatatctgacagtgtttgcggtgttttgcctgtatttctttatgtggacaacaactttttgggtgtcatggccagatttttttgtcagtgatcttcgaacggtcatgattgccttgatcgtagtaaaggcaagtgtgagcgaaaaaaaatccaattggaaagagcttgtctttgaaattggtttgatcgcagtatttttggcagtaaaaaacagaaatggacaagaaattctgctggatacattgcttttgattttgggagccaaagagatcgcgtcagaaaagttgattcgtgtgtataccgtgacgatcgcaaccgcattgtttgtaaccatcggagcctctttgctgggaatcattgaaaatctgtcctatgcacagccgggaagaatgaccagaatggcatttggaatcggttatccgacagatttcggggcacacgtactctttttattactctgctatttttatttgagaagaaaaaaaatacaatatgtggaattggcaattacggttctgatcggcggactgatctacattttttgcggagcaagaaccaatgcgttgtgtatctggctgttggcaggtgtccttttctataccaaaatcagaagagacgatgcaaaaaaaaggaaaaaagagtatgagatggcatcatggttttctggtctgcttgcatcggcaggaaccatctgcgctgcgggaatcctgattttatcaatgctttatacaaaaggaagcagtatatttttgaaactggactcaatcttgagtcagcggctttctttttccaaaaaagggatggaggtctatggattttccatattcggacagtatattcccatgcagggcaatggaggaagtacagagacaccattgaattactttttcctggacagttcctatatttccattttgctgcagtatggtctgatcatgtttgtgatgattctcattttgtgggggctcatcggattgagagcaagaaaagaaaaagactgggtgcttttgtggattcttgcgatcattgcatttcagagtattatggaacagcatttgctggatatttcatataatccatttctttggattttgtttgcagaaacaggaaagaaaagaaaacagaaaaaaataagtggagcagagaagaatatatgaaaaaaatggaaaaaaaatggccttttgttttcaatggcatcgtcatattctgtttgatcctgctgattctgggaatgcgctggcaggcgaaaaaggaagagtcagaagtattaaatgttacagaaagtcttcagaaagaaagtgagatcacttctttttcagaggaagaagaggcagtgttatatatgttgagtgccttgaaaaagaacgaccttgatatggcacttagaggatgtgcaattgatgagacagctctgcagatcaattttgtaaagacagcagaggaactcccggggatgcagcttatagatctgccggctccaacatcggattattcgtattattttccgcttacatcggcagaaatgaccaaagcatatattgagcagtttgaagaattgtcgacagaaattccggagatagagacgttggaagtgctggagattgcagagaaaaaggagaaagaacgagaagaacagctggcagagtgtctggcggctcaggaagtcagtgaactggaaatttatgtgaaatgtggggaacagagttacagactggggtttacggcagtacgatatgagaaaaactggaaaatccattcactaaaagaagggcttctctatgaaacggatatacctgcctatgtgcagatggaagagatgcgcgaggcaaaaaaaacgtatgtgcttccaaatcagctgacaggtgccaattattttcaggcgatgccgatttcagaaaaaacaccgcagcgggcagtggagcagtttatttatgcaattgaaaagggggatctgacaagagcgctggcgtttgcaacaacagaatccagtcaggatacatccccggaactgttgaaaaaacagggagaatatgcaaaagagttaaaaacaatgctgtatggatttttaggtacggaagatgcaagattgtacgggaaaagcgaagaacagctgaataagctgcgcggcaagttgaacccggaatatatggtatatctggatttgatcaaagtgattccaatagaaactgaagaaaatacagagacagtcaaacaatatgccggattatattcatacaacgggaaaaattatctgacaggctataccctttgcagacaggaggatggatggcagattcagtcattgagtgcaccggcactgtctcttgaatccggagaagtgatgcggctgtcaaaagaagaaagccgaaaaacatccgagcaaagtgtgttaaaggcagaaaaaaatgaaagatagacaatcaaaggagaaaacatggatcagaaaaaagtagttgattttttaggaatacggctgaacaacctgacggcggaggagattttggatcatgtagatcagtgtattgcacagagaaaaatctgccagatcgtcggagtgaatgtggatcaggcgctgcgggtgatcgaaaatcccgtttctaaaaaaatatttgaggatgcggaaatcgtatttacagatggaaaaccgatcatttggatggcaaaatggttaaaacgtccaatcgttgaaaaaatttcaggtccggatttaatggaattattgtgtgaacgggctgcgaaaaaaggataccggatatttttgctgggagcaggtccgggagtagccgcaaatgcagccaaaaatctggaacaaagatatccgggatttcagtgtgcaggtacctattccccaccgatggggtttgaaaaagatccaaaggagatggaaaaaatcatctcaatgttaaaagaatctcaggcagatcagctttttgtgggaatgggttccccgaagcaggatattttcatttatgaaaatatgcaaaaatatcagattcctgtgtcctattctatgggagcggcattggattttatcggaggaagtgtaaaacgtgcgccgaaatggatgtgtgatcatgggttggaatggctgcatcgctgtatgacaaatccaaagcgtcttgtaaaacgatatgtggaagatctgcggattttctcttattacagaaagttccgcagacaggagaaaaaagcaggtcgtctttaaaaagtcgtgcctgggaaaggaatttggcagatatgataaaagtactggtggtcgaaacgacaaagtgtggatatgatggaatcacaaatgtgatcaaaaattattttttatatcaggaagatcccgaaatccagatggacctggtgacgatcaatgaagctgttccggaattgaaaacatttttggaacaaaaaggccggagaaactatcaattgccctaccggaatcgaaatccgctgaaatatgtgatgaagctgcgaaaaatcctgaaagaaggagggtatcagattatccatgtacatggatgcagtggaacgatggcagtagaaatgctggcggcaaaattagcagggatcaaagtaagagctgcacatgcacataatacagcatgtacacatacaacaagtgacaaaatactgcgccccttctttttgaagtggtgtaattgcagatatgcgtgcagtgatgcggcaggaaaatggctgtacaaagggatgccgttttctctgatttcaaatgggatcgatctggaaaaatttcagtatgatccggttgtcagagaaaggctaagaaacgaatatgacttagaggacaaactggttattggtcatgttggaaggttttgtgaggaaaagaatcataaaaagattctggaaattgcaaaagagcttcaaaagaggcatcaaaagataaaactggtgtttgtaggggacggaccgctgaagcaggaaatcgaggagaaggcccgggaggacaagctggatgtattatttgtgggattaagtgatgtggtagaacaatggcttcaggcaatggatgtgtttgtctttccgtctttgtttgaaggattgcctttgggcctggttgaggcacaggcagccggacttccgtgtattttgagcgacagaatcgcttccatgacaaagattattgatgaagttcaatttttaaaactggaagcatcggatcaagtctgggcagatgcggttttgaaagaagccgcggaaaatgacagaataaaaaatcaggagaagattaagcagcagttgagagacaggaattttgatataaggctgaattgtaaacaacttgcaaagcgatatcaggaattatggagaggtgtgaactaatgaagatgaaatatttgattcttggagcaggaccttccggtttgacgctcgcaaacagactgaaacagatgggagaaacttcatttttcgtattggaaaaagaaaaagaggccggaggactttgtcgttccgcccaggtagatggttctccgtttgatattggaggcggacattttctggatgtgagacgtccgaaagtgaacgaatttctgtttcaatttatgccggaggaggagtgggacaaatttgacagagacagcaggattgcagtcaacggagatgtgatcagccatccgatcgaagcaaatatctggcagatgaaactggaaaatcaagtagagtatttaaaatccattgcagtggcaggctgtaacctgaaagaggaaatgccacaggagtttgtgtcctggatctactggaaactgggagataagatcgcagagaactatatgattccgtataaccagaaaatgttcggagaggatctgaaccagctggggacatactggctggaaaaattgccaaatgtcagctttgaagagactcttttgagttgtctgacgaaaaaagcatatggagagcagccgggacatgctcagttcttttatccaaaaaaatatggatatggagaattatggctgagaatggcagaagaaatcaaaggacagatccagtacgatgcagcggtccatacgattgattttgataccaatacagtgacaacaaaagagggggaaacgtattctgcggatgtgatcatttctacgattccctggatggaatttgcaaagatcacaggaatgccgcaggagttgaaggaaaaaatcggacgtctgaaatacagctctgttcagacggcgtatttcccggacaatctggacacagaagcacagtggatctactatccggatccggaactgtcttatcatagaattctggtgcgtcataatttctgcaatggaagcaaaggatactggacggaatgcaacagtacaagagtggacgaaaccacagaaagtacctttcaatatatgaaccagtacgcgtatccgctcaataccatcgggaagccagaaatcatgaaggagttgctggagtgggcaaaaacacgccgcgtgtatggtcttggaagatggggagaacatcagcattacaattctgatctggtcgtagaacttgcactgaagatggcagaagaattaaacagtgcacaataaaacacaggaggagtgtataacgaaacagcgttataccatcaaaacatggaaaaaataccgcacattatacattattgctggtttgggaaaaatccaaaatcagaactggtattaaactgtatagaatcctggaaaaaatatcttccaggctatgaaatacgggaatggaacgaagacaattatgatgtgacacaagtaaactttgtaaaggaagcctatgaaaatcaaaagtgggcatttgtatcagattatgtgagatttgatgcattgtatcagtttggtggaatttattttgataccgatgtggaattgctcaagccaattccggaagaaatcctggcgaaacgtgcgtttaccggatttgaaagtacaaaattgatcagtccgggtctggtgatgggatcgatcaaaggactggatctgatttcggagattttggaagaatatcagaaatcctcatttcttgtagacggcagaccgtgttataagactgtcaatgcatatacaagcgaagtgatgggcagacgaggatttctgacaaatggtgaatatcaggaaattgacggcattgccgtttatcctactgaatatttttgcgctgtggatctggatgtgcatgaaaaagtaattacagataagacaatagcagtacatcattatgcaggatcctggctgcagccatccctgaaaagaaaagtacagaatgtattgaaaaagacaatcggggtagaaaattaccggaagttgttgcatttgaaacgaaagatcgtaaaaaaggcagatggagaatcaaaatgaaagaacagaaagtttatgttgcaattgttacatataacagaaaagaatatcttttgaatttgctggaagcattgcagcagtcagagaaaaagatatcaggaattctgttgctggataataaaagtacagatggaaccaatcagacattgatggaaattggatttacagaaaaggatgacataggagttcttcatgaaaacacatggaaatccatgaaaacatattatttccgaaatacggaaaatgcaggaggggcaggtggatttgcaaaattgtttgaactttcgatgtcactttcctgggattatctgtgggtgatggacgacgatgtatatccggaaccggactgtctgaccaatttgctgaaatacattggaaaagatgcaggggtctgtatcccatcaagaagtgacggccgatatgaggatgaagtggtagttggaatcaatttaaaaagtgcattccgatatgcagaaaagagaaaaaatgtgatccggggcggaaatttgacacaggactatgtagaagtggtagatatgccatttgaaggacctttgtttacaagggagattgtggaaaaaacaggagttccagacaaaaattatatcattttatatgatgattccgattatgcaagaagagctttgaactatacaaaaatacgctatatcccgtctgcaatgcttcacaaagcaatcatcccggtgagggataagaagcagtgcatgacctggaaagattactacagctacagaaattccattcattttattcatttatacggagaaagctggagagcaaaacacctgtgtccgatttatatggcagcagaactgatcctgcgggcgctggtccgcagaaagtattccaatatcaaagtaatcttgcgggcataccgtgacggagtacatgagaatatgggaaaaacagtggaaccgggagctttttaacaggaagaaagaagggataaaatgtggaaacagtggaaaaaagcggctgtggttttgatggcatgcacgatgcttttgaatatgactggctgtaaaaagcaggaagagaaaccaaaagagcctcaaacggaacagaaaaccaggcaaaaggatgaaaaagaggcagagagcaaagaggaaacgattccggcgaatcaaaatctgctgaccggtcttgcagacatgtccgagacagccattggaaaacgtccggttgcagttatggtgaacaatcatgaagcggcacgtccgcaatatggaattgcacaggcggacattctatatgagattccggtggaaggcgatattacaagattgatggctctctatgcagactatacgaaagttccgcaaatctgtccgattcgaagctgccgctattattttccggcattgtctcaggggtatgatgctttttatgtaaactggggcattgatgatggtatcgcggattatctggaggcgcttcagctggatcagtatgatggaatttataatgcaggaggtctttttggccgcgatgaaaacagactggcagccggctattctctggaacatacaggatactttgacggaacaagatttggtgaggtggcgcaggctgaagggcgcaggatggatcttgcggaggatatgagacgcacggcatttcagttcggcagcttcaaggagccggtaagtccaaaaggggaaagctgtaaaaaagtggaaatcaattttggagcttgtgtctcatcatttgagtatgatgaagcaacaggaacatatcaaaaaagcatgaacggaacaccgcacatagatggaaatacaaatcagccgcttacatttaccaatctgtttgttctggaaacggaaatttctgtgcgtgatgaagtaggacataaaaatctggattgggatggcggttctgacagtgtaggatattacatttcaaatgggatgatacaaaaggtacagtgggcaaaagaaccgaacaatgagagatcaaaacttgccttttacgatgaaacaggaaatgaaatcaaagtgaaccgcggaaaaagttatattgcactcaattatgcaaatcaggcaacatttcaataaaagtataaaaacggaaccgatgtgggttccgtttttagttttgggcggcagttacaaatccgaaaaaaagccgcctcattttttcgctggtctggaacatcgattctggatgccactggactccgagagcaaaagggtgagaaggcagttccagagcttctatggtctgatctggagcaagtgcacagattttcaggccggatccaggtgtttttacagcctggtgatgaaaactgttgacataaatcgagcgtccgagatacgaaaagagtctggaggatttttcaatccgaatgggatgactgatatcacttcgtgagtcggtatgctgcatatgatccagacattctccgggctgataccggatatcctgatagatggttccatggcaggcggtgttaaaaatctgcagaccacgacagatggaaagcacaggcttacaggaagccagaacctgccgcatgagccggatctgaaataagtccagcgtaatgttggtgctgccgatgccggggcgcggctcttgtccaaataaaagtggtgtgatgtcattgccgccgcaaaataaaaatccatcgcagagttttaaatattgttttataacactgtcagaacgaatcagtggaaggagaatcggaattcctccggaataccggatggattgaatataagcgtttgatacgaactgacggttatcagataatccgcagatcacgataccgatcaatggtttttcagattcagatttcataatcatgtctcctgtcatataatatttacgatatccgttgtgtttttagcatatgtaaaaatgtggaaacttatgtaaagaaataaaaaagcaggagggaaagaaaatgaaaacgtggatcgatatgcactgtgatacattaagtgaactgcttctggcagattcgaaggaaacattgcaaaaaaatcttttgtgtgtggatgtgcaaagaatggaacaaacagaaatgctggcagaattttttgcctgctttgcagaggtttcggatggaaactgggaggcggggtatgagaaagcaaaaaaactgatcacccgtatggaagaagagctgaagaacaatcggaatctgaggcttttgaaaacgggaggagatgtggatcgtgcagaaaaaagcggagagaaacttgcacttctgacaatagaagagggaggcattttaaacggaaagctggaacgactggatacattctatcaaaaaggcatccgcctgatcactctgacctggaattatgaaaattgtatcggattcccaaacagtctgaatcccagatacatgcagaaaggattaaagccatttggaaaacaagtcatagaaaaaatgaacaaaaaagggatgttagtggatgtctctcatttgtcagacggcggattctgggactgcatccgatggagtaaaaagccggttgttgcgtctcattccaatgccagagcactctgccctcatccgagaaacctttcagatgagatgctgcatgcgatcggagacaaaggcggagttgcaggtcttaatttttatccacggtttttacggaaagattctcccgcacaggtttcagatctggcaagacatgccatgcatatgctgcaaaaagcaggagaggatgcagtggctctgggaacagactttgacgggtttgcggcagatcagaaatggcttcatggaatcgaagacatagaaagtgtgtgggaaatgatgaaaagagccggattcacagaacggcagctggataagattgcattgggaaacatcaaacgagtactgcaggaggtactttaaaattttaggatttaaaactttaaaactttgtcaaaacaaagtctggttatccgcaggagaatttggtacaataggaaagactgaaattacaaaggaaaagaatagggaggatttttcaatggaaaatcagaaaatcattcaggtggaagagaaggtaccatttaagctgcttgttccactgagtattcagcacatgtttgccatgttcggtgcatctgtgcttgtgccgtttgtgttcgggatcaatccggcaatcgtattgttcatgaacgggatcgggacactgttattcatcttcattaccaaaggaaaagcaccggcatatttgggttccagctttgcctttcttgcaccggcaggaatcgtaatcagtaaatggggatatgaatatgcgcttggaggatttgtggcagtcggatttttaggatgtatcctggcactgatcgtttacaagtttggatctgactggatccatgtagttttacctccggcagcgatgggaccggtggttgcattgattggtctggaactggcaggaacagcggcgtccaatgcaggattgaaagacgaagtgatcgatccgaaaaatgtcattgtttttcttgtgacactaggcgttgcagtacttggttctgtattgttccgtaagttttttgcagtcattccgattttgatcgcaattattgcagggtatgcagcggcgattctgtgtggaatcgtagatttctcgaatgtaagtgcggcatcctggctggcagtgccgaacttttcagcaccaaagttcaagtgggaagcaattgtgatcgtattgccggtacttctggtcattgcttcagaacatattggacatcagatcgtaacaagtaaaattgtcggaagggatttgttaaaagacccgggacttcatcgttctttgtttgcagataacttttcaaccatgatctccggatttataggttcggtaccgacgacaacatacggagagaatatcggagtaatggcgatgacgaaggtatacagtgtatacgtgatcggaggcgctgcggtgctttctattatttgttcttttatcggaaagctgacgatgctgatcaattcgattccgggaccggtgatcggaggaatttcattcttactttatggaatgatcggaacatccggtatccggatcctggtagaagaacaggtggattatggacgctccagaaatatggcaatgacttctgtgatttttgtgacaggtttgtccggaatttctgtagagtttggaggaatccagctttccggaatggtacttgcatgtgtgacaggaatgctgatgggactgttgttctttgtattggataaattaaaattgaccaatgacagagcggcagaataaatgattgttttagcataaaaaatggtgagcgttcgttttggacgttcaccatttctttatggtaatttatttttctaattcctgcattttcatagcacgcactttcagaggaagtccaaacaggttgataaatccttctgcgtcatggtgatcatagagctctccggttgtgaagcttgcaagggattcactgtataaagaataaggggaagttgttcctgctttgatgatatttcctttgtacagtttgaattttacttcaccggttacatactgctgggtgacatcgacaaatgcctgtactgcctcacgaagtggtgtgaaccattttccttcgtacacgatctgcgccattttattgcccatatctttttttacttcataagtcgcacgatccaatacaagttcttcgagctggtcatgtgcttccatcaggattgttccgccaggagtttcatagacaccacgggatttcattccaacaacacgattttctacaatatctacaatgccgataccgtgttttcctccgagtttgttaagttcagtgatgatttcagataccttcatttcttttccgttcagactcttcggtacaccggcttcaaatgtcatagttacatattcgccttcatcaggagctttttccggagaaacgccaagtacgagaaggtcatcatagtttggttcgcatgcaggatcttccagttccagtccttcatggctgatgtgccacaggttacggtcgcggctgtaactgtgttttgcatcaaacggaaggtcgataccatgtgccttgcagtattcaatttcatcttcacgagactgcatggtccaaacatctgtcattcgccatggagcgatgatctttaagtccggggcgagtgccttgattccgagttcaaatcggatctgatcgtttccttttcctgttgcaccgtgacagattgcagttgccccctcttttcgtgcgatttctaccagtttttttgcaatcggcggacgagccatggaagttccaagcagatatttattttcatatacggctcctgctttgacacatggaacgatgtagtcatcacagaactcatcgataatattttcaatatagagtttcgaagcgccggacaattttgcgcgttcttccagtccgtccagttcttctccctgtccgcagtcgatgcagcagcagatgacttcgtaatcaaaattttctttcagccagggaatgatcgcggtcgtgtccagtcctccggaatatgccaatacaactttttctttactcataataagatcctccttaaaatttttctatggtctgatattttgccgccgatgttgacgataaaacggttacgctttagaagctaattagtaatatacacctaaatttataaatatgcaatagaaaaagtgaaaaaagtaaaaaatatacagaaaaattcaaaaaagatgcataaaatggagatggtataaatattttgttggaaagaagagaaatatcagttataataagagtattgtaaaatgtgaatcaggagagaatgagtatgaatatattagttgtagtagatatgcagaatgactttatcgatggttcgctgggaacaaaagaggcacagagtattgttccaaaggttttggaaaagattcagaactttgatggaatggtgtttgcaacaagagatacccacggagaagattatctggatactgcggaaggcagaaagcttcctgtcagacattgtatccgggagacggacggatggcagatccggcaggagattgcagagcttctgacagagcctccgattgataaagtgacttttggaagcagggagcttgtaaaaaaactggaagaaatccatgagaagactccgatcgaaagcattacgctgattggtctttgcacagatatctgtgtgatttccaacgccctgctctgcaaagcgtttttgccggaagttccggtacaggtggacgcacagtgctgtgcaggagtgactgcagaaagtcatacgcaggcattggaggcaatgaagatgtgtcagatcgacattctatagaagaaacaggaatgaaaaagaaggtacaaaaagatggatagaaaagacatactgctgaataagcagagaattgtgatcaaagtaggaacctctacgatcacttatgaagagacaggcaatatcaatctggagaagctggaaaaatttgtccggattctgatcaatctgagaaataagggcaaagaagtgatcgtggtctcttccggtgcagttggtgtcggaaagaatgcacttgggatggacaggcgtccgcagacggagtcggaaaagcaggcatgtgccgcagtagggcagggaaagctgatgatgatctacgaaaaactgttcaatgaatacggacagcttaccgcacaggtgcttcttaccaaggaatctgtgaccaatacaaaatgccggaaaaatgcgaagcagacgtttgacgaactttttaagatgcaggttgttccgatcgtcaatgagaatgatgcgatttcagtggatgagctttcttatggcaacttcggagacaacgatacactggcggcatatgtatcccgactggtagaagcagatcttctgatcttaatgtcagatattgacggcttatatacggatgatccaagaaaaaatccaaatgcaagatttattcatacagtcgggaagattggacgcaaactggagaatatggcaaagggatcttccagcgaatgtggtacaggaggaatggctacgaagatcaaagcggccaagatcgcgacagcagcaggcgcagatatgatcattgcaaatggagataacatttattcgatcaatgaagttatgaatggaaagaaagtaggaacgttgtttttgtctgcacagcatcagcaggagatgccggaggaactggcaccggaacgggcagagttccgccgacaggcaaagcgtgaaaagaaagcttaacgggatcaggaaaggagattacggtatggaaacgtatatggagacactgggcagccgggccaaagaggcatccagagcagctgcaaaaatgacaacttgtgaaaagaaccggggacttgttctggtagcagaagaattatgtctgcgcaaagaagagctgcttttggaaaatgagagagatatggaagcggcaaaagcgcagggaatgtcagaggcgcttcaggacagattgaaactgacagaaggaaggatcgaggcaatggcggaaggattaaaacagattgcggcattggaagatccgatcggagaagtactttccataaagaatcgtccaaatggactgcgtatcgggaaaaaaagagttccgctgggtgttgtgggaatcatttatgaatctcgtccgaatgtgacagcagatgcgtttggcctgtgttttaaaaccggaaacgcagtgatcctgcgaggaggaagtgatgcgatccattccaacaaagcaattgtacaggtaatcaaagccggacttcgcaaagcaagactttctcaggatctgatcttgcttgtggaggataccagcagagagacggtaacagaaatgatgcgtctgcatgattacattgatgtgctgattccgagaggaggagccggactgatcgcttctgttgtggcaaacagcacagttccggtgattgagacgggaaccggaaactgccacatttatgtagatgagagcgcagacatcaatatggcggcagaaatcatcgaaaatgcgaagacacaacgtcttggagtatgcaatgcctgtgagtcactggtgattcatgaaaagatactgcagcaggcacttcctgcaattgtgaaacggctgaacaatcatcaggtagagatccggggagatgagaaagcaagagaagtatgcccgcagattcagtctgcatcagaagaagactggggaacagaatatctggatgcgatgatttcggtgaaaacagtttcgtctttggacgaggcaatccggcatatcaatcagtacaacaccggtcattcagagtccattattacaaaagattataacagtgcgctgcgttttcaggatgagattgatgcagcagcggtatatgtaaatgcctctaccagatttacggatggatttgaatttggctttggggcagagattggaatcagtacacagaagctgcatgccagaggtccgatgggactggaagcattgactacaacaaaatatattatttttggaaacggacagatccgaaaataaaaaaataaaaaccatgcttgcatattatacaaaaaagatgtatacttatgcaaacgtggttttttcttatgcagaaacaagaataaaatacaaaaaaatacatacaaaatgaaaaaaatgtgaataaagtgagaaaggagtttttagaatgataaaagcaggaattatcggttcaacaggatatgcgggaggagagctggttcgtattctgactgcgcataaagatgtggagataaaatggtacggttccagaagctatattgatcagaattacgcggatgtataccgcaatctgtttcagatcgtagatgccaaatgtatggatgataacatgggagtactggcagatcaggtagatgtgatatttacagcaactccgcagggactctgcgcatctttgatcagtgaggacattctgtcaaaggcaaaagtcattgatctgagtgcggacttcaggatcaaggacgtgtctgtctatgagaagtggtataaaatcgagcataaaagcccgcagtttatacccgaagctgtctatggactttgtgagatcaacagggagcagatcaaacaagcaagactggttgcaaatcctggatgttatacaacctgctccattctcacggcatatccgctggcaaaagaaggtgtgatcgatatgaatacattgatcatcgatgcaaaatccggaacatccggagcgggacgcggggcaaaagtggcaaatttatattgcgaagtgaatgaaaatatcaaggcatatgcggttggaagtcacagacatacaccggagattgaagaacagttgggatatgcagcaaacgagaaggtaacactgaactttacgccacatctggttccaatgaaccgggggattctggtaacagaatatgcgtccttgaaaaaagaggttaccgcagaagaagttcgccagatttatcagtcatattatggaaaagagccatttgtccgggttttggatgatggaatctgtccggagacaaagtgggtggaaggaagtaattatgtagatattggatttgttcttgatccgcgtaccaaccggatcattatgatgggagccatcgacaatctggtaaaaggagctgccgggcaggcagtacagaatatgaaccttttgtttggcttcaaggagcaggagggactggagctggttccgatgtttccgtaaagattccataaaaagggggacaaaagatgattcgtacaatgacgattgaagattatgaaaaagtatatgcactctggaaaaagattcatgggtttggtcttcgcagtatcgacgattccagagaaggcattgaaaaatttttgaagcgaaatccgacaaccagtgttgtggcagtggaggatggaaatattgtgggcgctattttgtgcggacatgatggaagacggggatgtctgtaccatgtctgcgtagatgaagcgtaccgcagacatggaataggaaaagcaatggtggtacaatccatggaagcgttaaaagcagaggggatcagcaatgtttctctgattgcatttacgaaaaatgatattggaaatgcattttggaataccattggctggaatgaacggcaggatttgaattattacgattttgtgttgaatacagaaaatatcacagcatttaatgcacagtagaggaggtatgcacgatgaagacaatcacaggaggagttacagcggcaaaagggtttgaagcggcagcggctgcagcagggatcaaatatgaaaacagaacggatatggcgcttgtatacagtgtaaagccatgtaaggtggcaggtacttttaccacgaacgttgtaaaggcagcgccggtaaaatgggatcgaaagatcgtggaatcgaacgtgaagtcacaggcagtggtcatcaattccggaattgcaaatgcctgtaccggagaagaagggatgcactgctgtgaagaaactgcgaaagcagcggctgaggcactgaagattccggcagaaggagtactggtaggatcgacaggagtgattgggatgcagatgccgattcataaattaaaacagggcatacagattctggccaaagagaagaaatccggtacagaagcggcaaatgcagctgcgaaggcgattatgacgacagatacccgggagaaagaaattgctgtgacagtagaaatcggaggaaagaccgttaccattggcggaatggcaaagggatcgggcatgatccatcccaatatgtgtaccatgctggcatttctcacaaccgatgcagtgatttccagaaaagcactgaaggcagcactttctgcggatgtagaggaaacttataatatgatttctgtagacggggatacttccacaaacgacaccgtacttcttttggccaatggaatggcagagaatccaaagatcaaagagggaaccagggagtttgaaaaatttgcagaagcactgcatgaagtaaatgagacactggcaaagaagatggcgggagacggagaaggcgctacggcgttgtttgaggtaacggtacggggtgccgatacgaaagcacaggcaaagacgctggcaaaatctgtagtctgctccaatcttaccaaggcagcgattgccggtcatgatgcaaactggggtcggattttgtgtgcaatgggatattccggagcaaaatttgatcctgagaaagtggacttgtattttaagagcagtgccggagagctgaagatcatcgaaaatggtgtggcattggactacagtgaagaaaaagcaacagagatcttatccatgccggaagtgacagcgattgcagacataaagcagggcaaagaaacagcaacagcgtggggatgtgacctgacgcatggctatattgacatcaatgcagattatcggagttaatatttgagacagaagttgaaaagacaggcaggaggaatgagaagatgaatgaaaatatgaatcaatatctggagaaggcaaaagttctgatcgaagcattgccttatatccagcggtttaaccgaaaaatcgtagtggtaaaatatggcgggagtgccatgacagacgaggcattaaaaaagaaggtcattgaagatgtaacactgttaaaattggttggattcaagccgatcattgtacacggtggtggaaaagaaatcagcaaatgggttggaaagatcggaaaagaaccaaagtttatcaatggtcttcgtgtgacagatgaagagactatggaagttgcagagatggtacttggaaaagtcaataaaagtctggtgcagctgatcgaaggactcggcgtacgcgcaattggaatcagcggaaaagacggcgggcttttgaaagtggaaaagaaatactcgaatggagaagacattggatacgtaggagagatcaaaagtgtagatgcacagattttatatgatcttctggaaaaagattttcttccggtagtatgccctgttggaatggatgatgaattccacacatacaatatcaatgcagatgatgcggcatgtgccatcgcaagagcaatgaaggcagaaaaactggcatttctgacagatatagagggagtttataaagatccgcaggatccggctacactgatttcagaactttttgtaaaagaggcaaaggcgttgatcgaggaaggatacattggcggggggatgctcccgaaactgaacaattgtatcgatgccattgaacatggagtatccagagttcatattttagacggacgaatcccacattgtctgcttctggaattctttacaaacaaaggaatcggtacagcaattttacacgaagaagaaagcaggtattatgatggtaaatgagaagatcaaagcagcagaagaaaatttaatacacgtatacaatcgttttccgatcgcattggagaggggggacggtgtctatctgtatgacaccgatggaaaaaaatatcttgattttgcggccgggtttgcggtgtcaggtctgggatatggaaatgaaaagctcaatacagcattgaaatcacagatcgatcaactgtaccatacatcgaatctgtattatcatgcaaattgcggagaagcagctcaaaagctgaatcggatttccggaatggatcgcgtattttttacaaacagtggatccgaggcaaatgaaggcgcactcaaggcggcaaggcgatacgcatacaataaaaaatccggaagatatcagtttattgcaatggaaaattcattccacggacgtagttttggcgcagtatctgtgactggacatactgcgtacagagaaccttttgaacctatgctcccgggagtttcttttgcagaattcaataatctggacagtgtaaaggcactggtgacggatcagacctgcgcaattattttagaaccattacagggggaaggcggaatcaatcttgccacacaggaattcatggaaggaatccgaaaaatatgtgatgagaacgatattctaatgatctgcgatgaagtacagtgcggaatgggcagaaccggggcaatgtttgcatggcagaaattcggtgtaaagccggatattatgaccatggcaaagggcatcggaaacggcattccggtgggggcttttgccatgacggagaaggtggcacaggcatcgttaaaaccgggggatcatggtgcaacttacggcggaaatccgctggcatgtatggcggtgaagaccgtgatcgatatttttgaggaagaaaagatcgtagatcatgtcagggatgtggcgtcatatcttacagaacggctggaagagctggtacaacatgtcgatggggtacttgcacgaaaaggaaccgggctgatgcagggaattgtattaaagcagccggtggcgcaggtcaacaaccgtgccattgaagaagggcttcttgtgattcaggcccagggcaatgtactgcggctggtaccgccgcttgtgattgaaaaagaacatatagatgaaatgatcgaaaaattgacaaaagcgttgacggcgtaatgaaaaaccaggaatcgggacatactaaaggaaattgagaaatatttcaggaggtagaaaacgatgactggttttttaattgcacttttttccggtgcactgatgagtatccagggggtatttaatacccaggtgacgaagacaacgggattgtgggtgagcaatctatgggtacagctgagcgcctttctggcctgcctggcagtgtggttttttgcaggcaggacagattttacggcgcttgcaaaagtggaacccaaatatatgcttttgggcggcgtgatcggagcagggatcacatggacggtggtgaaaagtatggcatcattaggccccgcaaaggcagctcttctgatcgtaatttcgcagctgatcgtggcctatgtgatagagcttctgggaatgtttggtgtggaaaaatcaccctttgtatttcgaaagctggcagggctgatcgtggcattgatcgggattgcggtgtttcagtgggaatagaacgttgtgtctgtaataaatacgtaacaggattgtaaaaatgttattgtaatttcagacgtttttcgttacaatattactgtccgacataaaaggggattccttgcggtcagagagtgaggaaataaatggacagatggaaaaagacaacgtatgatacagtccttttgattttgacggttttggttctgtgcgtgggatgcggacaggatacagaagaagagctgcaggagatttcactggaagagatacagaaagaaaaaagtgagggttctgcgtcaaaaacagacgatgagaggaaagagtcaaagaaagacgaaaaagtttttgtgtatttgtgcggagaagtcgtacatcccggtgtatatgaagtaagcagagactccaggctttatgaagtgattgcgatggcaggcgggcttacagccgatgctgcacaggaggcagtcaatcaggcaaaggttgtggaggacgcagagcagatctgcattccttccaaagaagagatgcaggcaaaagctatgcaggaaggaagcacagcagaagaaaaaccgggagatggaaaggtgaatctcaatacagccaccagggaagaactgatgactttatcgggtgtgggtgagtcgcgggcagacagtattgtggcttatcgggaagaacacggtggatttaagagtacagaagagctgatgcagatcagcggaatcaaagaaggtctgtatcataagattaaagataatattacagtatagcaggaagttgaaggaagaaaatatgagcaagaagaagatcttagtagttgacgatgaaaagttgatcgtaaaagggatacggttcagtctggaacaagatgatatggaggtggactgcgcttatgatggcgaggaagcgctgcagtatgcaaaaaattgcgaatatgatcttgtactgctggatgtgatgcttccgaagatggatggatttcaggtatgccaggccattcgtgaattttctgatatgccgatcgttatgcttaccgcaaaaagtgaagatatggataagatccttgggctcgagtacggagctgatgattatattacgaagccgtttaatattctggaggtaaaggcgcggatcaaggcaatcatgagaagaactgcaagaaaagaagagaatacccagacagcaaaggttctggtcaaaggcaacatgaagatagactgtgagagcagaagagtgtttatcggcgaacgtgagatcaatctgactgcaaaggaatatgatgtattagagcttcttgccatgaatccgaataaagtctacagtcgtgaaaacctgctggatcttgtatggggtgtggattatccgggggatgcaagaacagtcgatgtgcatatccggagactgcgtgagaagattgaactgaatccaagtgagccgaagtatgtacatacaaaatggggggtaggttattatttccagggataaaatacatatcagagtaaagaatcatatatttcagagtatgcggttttggctgatcgtgttgtttgtgctgtttggtctgatcccttgtctgatttcctatatctggacagtcaagacatatgagcagcgcgcagtttctgtcagaaccgcagaaattcagaatcaatgtacaattctaagcaatcagctcaatagctatcagtatctgacggatccgtcttctgaagtgatcgatgcgaacttaacccaattgacgaatatttataacggacgtgtgatgatcatagaccagaacctggaggtgatcaaggacacctatggtctggatgaaggaaagagcatgatttccgagaatgtgacccgttgtctgaaacaggggaaaagtatcagttcctatgaccggaaaaaccggtatgtggaagtgacagcgccggttatttcggaagaaaagacgatcacaggagtgatgctggcaagtgtttctatggatacggttctggatggaacgagtgtgttccggacacagggcggaacaatcctgatcattgtttttctggttgtgctgtcgcttggaattcttgcagcaggctggtttgtgcgccctcttggaaagatcacagagtccattgagaatgtgacggaaggatatgaaagtgagtggctgcatgtggggactttttcggagaccgggcagttgtctgatgcatttaacaagatgctgggaagattaaaacagctcaacgattccagagaggagtttgtatccaatgtctcccatgagttaaaaactccgcttacctctatgaaggtgcttgccgattctctgcttgcacaggagaatgtgccaatcgagctgtatcaggaatttatgggggatattgccaaggagatcgatcgggagaatgatatcatcagtgatcttctgaccctggtcaaaatggacaagactgttcagagtctgaatatcaaaccagtcaatatcaatgaacttctggagtccatattgaaacggctcaagccgattgcagataagaaaaagattgaagtggtactggaaagtttcagaccggtttctgcggagatcgacgaaatgaaactgacacttgcaatttccaatttggtagagaatgcaatcaagtataacaaagacgaaggatgggtgagagtttctctgaatgcagatcataaatatttttatgtgaaggtgatggattctggaattggaattccgcaggaggatcagacacatatttttgaacgattttatcgggtggacaagtcccactccagagaaatcggcggaacagggcttggtcttgcgattgcccgcaatgcggtgatcatgcacagaggttcgatcaaagtttacagcagcaaaggagaaggtactacatttacggtgcgcattcctttgatctatgcagcataagggggagcagatgaaaataatcagaaaaattctcctgatctttgtaggaatctgtcttgcttgcacgacggtttcctgtgccaaacgcacggaggtgaaaaaaggagattcttatatttattgtttgaacagcgacagaaccggacttaagaaagtcgtctatcaggtcaaagaaaaagatccgctcaaagccgctgaggcaatggtggaagagctgaaaaagccggcagaggagattgaatatacaccgccgattccaaatgaggtaagcgttgagcattataatctggaaggcggaatcttatatttggatttcaatgcggaatataaacagatgccagcggtagaagagactttggtgagggctgctctggtgaagtcccttgtacagatccgtggaatcaacagtgtctggattcgggtagagggtgcagatttgacagatcgttcgggacaggtgcttggctatctgaatgaggatgactttgtacaaagtgagggggcttcgccaggttcttatcagacagagacggtcacgctgtatttttccaatgacgcaggggatgcgttgcgggaacagacgatggaggtacgttacaacagcaacgtttcaaaagaaaaaatgattgtagaaaggctgatgaaaggccctcagaagtcttctgcaaaagcaacgatcaatccagatacaaatttattgagtgtaacaacaaaagacggaatctgttatgtgaattttgataagacatttctgaagggagcctatgaagtaaaaccacaggttaccatctattctctggtgaattcgctggtgcagggcacaggtgttggaaaggtacagatttcgatcaatggagaaaatgatatcaaatatatgcagacagtggatttgagtcagccgcttaaggctgatcttagctggaatgagggggaacgatgagaaaacgccccctttgtatggcagcagcggcagtggtatgtatgttggcagtggtgaacatctggtttgaatctgttcttttcaaaccatgtgcactgcgccggagcattccagatgcttctcaggtgatcgtaacaggtcaggtgaagcgatgggaggaaaaaccggattacaggatattttatgtaaaaaactgccgggtgctgcaaacgaaaagaacaatcgattctgacagacaatctgtcaatgagcaagtcaaagaacaagtcatggcaaaggcgatacaggagccggagcttctaatttatatcgaacaagatcaaaaagaaaccccaataatcaaacttggaaatcggatatgggttcagggagaactttcttattttgaagaagcgagaaatcccgggaattttgaccgaaaattttattatgaaaaacagaaaattcatgccagtgtatgggcgaaaaagagtcggctcctcaattgtgagacatggagatttcgggaaaagctggcaaatataaggaaaagctggaagaatctgctggtcagacagatgggaagcagacatggaaacagcatgagtgcgatattactgagtgagaaaagcgaacttgatgtgcagataaaagcattgtatcaaaaaagtggaatcggacatattctggcaatatcagggcttcatatgtcctttatcggaatgggattttacgggcttttacgcagattgggatgtccgatcaaaccagcgggagtgctgggaattttatttttactgagctacactgtgatgatcggaggcggagtgtctgcaatgcgggcatttctgatgtttggaattcggatcggagcagatttttgcggcagagtgtatgatatgccgaccagtctttttgtgacaggagcgctgatcgcatgggattgtccgctgtatctgagggacgcaggatatctgctctcatttggagcggtacttggaatggcagcagtctatccgatgatgaccaaaccagggaaaacgaagtcaaagcttctgcaaagcctgcaggccagtctgtccgtcaatctggtactttttccaatcttgctttctttttattatgaatttccaacgtattctctgcttttgaatctggtgatcatcccaatgatgtcggcagtacttggagcagggctgttgggctctgcgttgtgccttttttggaaaccggcaggaaatctgcttctttttgcatgcaaaggaattttagaattgtatgaattatgctgcagtttgagtatgaaacttccattttccagaatcgtgaccggaaaaccggaaacaatctggatgattctatattatgcagtcttacttgcagtctgcctgtatctgcggacaagaagagaagcgaacaggcgaaatgctctgtttgcatgggggattttgctggcggcgggaatctttcttgcaggaagctgccggatcaaaagcaatggggtatttcaggcaacgatgctggatgtgggacagggagatgggatttttttgagaagcccggatgggcatacttgttttgtagacggaggcagcagcgatgtgtctaaagtaggggaataccggatccttccatttctggaatctcagggggtaaaagaattggagtatgtatttatttctcatggagatatggatcatatgagtggaatcgaagaactccttcaaaatcagatgcttggagtgcggatccggaatctggtcctgcctccggtcagacttcacgatgatgcattgcgaaaactgggaaagacagcaaaacaggaggggacgaaggttttacagatggaggccgggcagaaggtgacactgggggaactaaagctgacctgcatggctccttccggagaataccggggggaaatcggaaatgcggcatcgatggtattatggatggaatgcagaaatctggagatgcttttgaccggagacgtggaaggggaaggagaagtgcagcttacagactggctgagagaacaggaaaaaacagagtgtgatattttaaaagcggcacatcatggatcaaagaattctacgctgccggaatttttacagcaattgacacctaaatatgtatggatttcatctggaatcggcaatcggtatggacatccggcgaaggagaccattgacagattgaaggaaacaggatgtcaattgtatggaacacaggaatgcggagcggttacgataaaaataaagggggaaacagccgaaatcgaaacattttgcaaaaagtaaacatttccgatataatagaaactatgaaaagtttgaatgaagatttaaaaacaggacaatttagtcagatttatctcctttatggagaggaaaactatctgaagaaacaatataaggaacgttttgtcaaggccatgcttccgcaaggagatactatgaattacgcctattatgaagggaaaggcgtggagatccgggaagtcattgatctggcagagacgctgcctttttttgcagaacgcaggttgatcgtatttgaaaataccggactgtttaaaagttcgggtgcagatctggcagagtatatcaagaccatgccggagactacttattttatctttgtggaagaagaagtggacaagcgcagcaagttgtataaggcggtgaaagcaaaaggtcatattgtggaacttccgtttcaggatgaatctacattgaagcgttggatccttggcaatgtcaggcgggagggaaaacggatatcggatgcttcggtcggatattttctgggaaaagtcggaaccgatatgcagaatattcagggcgaactggaaaaactgttctgctatacactgcatcgggatgtgatcacaccggaggacatcgatgcagtctgtatcaaccagatcggaaatcatatttttgagatggtcaatgcagtggcagagaaaaagcagagaaaagcgctggatctgtattacgaactgctggcattaaaagagcctcctatgagaattttatttttgctggtcaggcagtaccggattttattccatgtacagtcactgcagaaaaaaggatacgggaaaaaagaaattgcagcaaaagcaggtctgcatccgtttgctgcgggaaaatatatggagcagacccggtattttaagagcgaagaattgcgtgccgtgttggaagagagtgcggatctggaggagcgtgtgaagacaggaaggctgacagatacactggcagtggagttgtttttggtaaaatactcatcgtaaatgacagatgttcttgtcaaaacaggaaaggcatgatagtatatttttgcataaaacagaagaacattcagcatagaagaaaatagaaaaagacagagttactggaggaatgaacgtgtcatcaattgatcagaataaaatacgaaatttttgcatcattgcacatatcgaccatggaaaatctacgcttgcagaccggatcatcgaaaagaccggacttttgacaagtcgtgagatgcagtcgcaggtgctggacaatatggaactggagagggagcgcggaatcacaatcaaagcccagactgtgcgtaccgtatacaaagcaaacgacggggaagagtatatcttcaacctgatcgatacaccgggacatgtggattttaactatgaagtgtccagaagtcttgcagcctgtgacggagcaatcctggttgtagatgcagcacagggagtagaagcgcagacattggcgaatgtgtatcttgcgctggatcacgatctggatgtgtttccggttatcaacaagatcgatctgccaagcgcagagccggatcgcgtaaaagaagagattgaagatgtgattggaatcgaggcggatgatgctccgttgatctcggcaaagaccggactcaacattgaagaagtgctggagcagatcgtgaagaagattccggcaccggaaggagatccgaaagagccgttaaaagcattgatcttcgattcggtttatgatgcttacaaaggtgtcatcgtattctgccggatcaaagagggaagtgtgaaaaaaggaacaacgatccggatgatggcaacaggagcacaggcggatgttgtcgaggttggatattttggagccggacagtttattccgtgtgatgagctgagcgcgggaatggttggatatatcacagccagtctgaaaaatgtaaaggacacccgtgtcggtgatacgatcacagatgcggcgcggccgtgtgcagaacctcttccggggtataaaaaggtaaatccaatggtgtattgtggattgtatccggcagatggagcaaaatatccggatttgagagatgcgttggaaaaattgcagctcaatgatgcggcgctgcagtttgaagcggagacatcggtggctcttgggtttggattccgctgtggattccttgggcttttgcatctggagatcgtgcaggagcgtctggagagagagtataatctggatcttgtgacaactgcgccaagtgttatctataaaatccataagacaaacggagaagtgatcgacctgaccaatccaaccaatatgccggatcctgcagagatcgaatatatggaagagccgatggtgaaagcagagattatggtgacttcagaatttattggcgccattatggatctgtgccaggaacgccggggcatttatcagggaatggaatatattgaagaaaagcgtgcggtgatccattatcaccttccgctcaatgagattatttatgacttttttgatgtattgaaatcccgttcgagaggatatgcttcttttgactatgagatgcttggatatgaacagtcagaacttgtaaaactggatattctgatcaacaaagaagaagtggatgcactttcctttatcgtacacagtgcaacagcatatgagcgaggcagaaagatgtgtgagaagctcaaagaagagattccaagacagctttttgagattccgatccaggcagctgtaggaagcaagatcattgcaagagaaaccgtaagagcgatgcgtaaagacgtactggccaagtgttatggcggtgatatttcccgtaagaaaaagttgctggaaaagcaaaaagaaggaaagaagagaatgcgtcaggtgggaaatgtagagattccgcagaaagcattcatgagtgtgctgaaattggatgataattagaggaaacaccccgtcagagaaaagatgagctctgcaggggtgtttttgaataccattttagaaaaatgtatcataggaggagaacaaagatgggtggattattttcagtggatggaaaatttgcgcagtttatgggcaagctggcagatattattattttaaatgtcctgctggtggtgtgcagtattccgattgtgacagcaggagcagcggcaacggcattttactatgtgatgttaaagttggtaaagaatgaggagtcgtatgtgttccgtagttttttgaaagcatttcgcgagaattttaagcagtctacgatcgtgtatctcatcatattgggtgtggcagcggtcatcgggattgatttttattttgcagtgaaacagggtgggggaacaggcaatccgctatttgttgtattttgtatcattgcattgtttttttatatgggaagctgttatctgtttccgatcatggctttttttgagaacagtacgaaaaaggtatttaagaatgcattcctgatggcgattgcacattttccatatacgattttaattgctttggtcagctttttcccgtggtttgtattattgtttggacagatcctgccagccatattttttaatctgatcatcggattttctttgtcaggatttatcaattcacaattatttcgaagaatttttaaaagatatataccggagtagaagagatgggagaaaaatatgagtctgacttgagcagacaggaaaaattagaacaacagtggaagacaatccgcagtttaaagggaaagaagaaactggaatatttgtggagttactataaagtcattctggtcattcttctggcagtgattttggttgtatatacggcaggtgtgatgatacggaatggaaaagaaaataccgtgctgtcaattgtaatcgtggatgcagaaaaaaatgatgatgaagcggcggaagagttggaaaagaagttccttcatatattgggagcagacggtaagtacgatcatgtagaaacggtactctccgcaagctctgtgcagacagaagaaaatattgcaaaactccgagtatccctttctgttgtaggagaggcagaccttgtaatctgcagcaaagaggtgtatgaagagtatgcaagtcagggagcatttgcagatgagactgctttactgggagcagatgccgagaaggcacaggcatatatgacagacggacagatagatttgagcaagtgtccggaaaattttttgagtgaatcggtatcctattcaccggcatatctttgtgtgctggggcatacggagcgcagtgaggcggcagagacggtcttaaaagcgctgatcaggtaaagacaggagctgtacatgtcaggaaacgagagggggcagcatgcagaagatcaacgaatggtggagaaccaaatttaagaatattacattgaccaggaagatgcttttggtatatgcagtttttgcaggtttcttttttggagtttcaattctggcatttcaaggcagtacggatgtttttgaaaagaaactgtatgacaattccattcgggaactggattattatgcaaaagacgtgaaggacagtctgcaaagagtcagtgatcgaagttatgagatgttattggattcggagctgcagtctatacttggaaaactgcagcagacaaaaccggaaacgctggagtataatcagttattgaccagtatccggtggagtcttgtcaatgataagaacctgaaatcagatatccagacgatttattacattgacaattacgggaatacagtggaatccggtcaggcggcatgggaaataccagaagaagaaaaagatgtttttatgcaaaaaatcagagattccaacggagaagctgtgttttatggtccgacaaaaaagtgtaagtatctgctctgtggaaggaaaatgcttaactggcaggacatgagtctggaaaatatgggaacgctgatgctggtctgtgacgtgggacagatgatcgagcgggataaaaaactgctggaagcagaacatgcatcgatgtttgtgtatacagacgatcatatgatctatcaggacatagaagaaagccttccgccattgccgcaaaataaagatggacaaggatataaagttttgaattatcagggggaacgctacttcatgtgttacctgagtacttccgagaatggctggatgtatgtaaacttctttccatattccgatgtgtatggacagattgagcgggtgaggaatcttgcactgtgtagtttttgcgtagtgtttgtgctgcttttgtttttgattcacagaatatcagaaatcattacaaggcctcttgaaacattggtgcgatccatgcaagtggtggaaaccggagattttgaaagtgcaaaacagattccgatggacgctgagcgtgaagatgaagtaggacttttgaccaaagaattccgagtgatgctggatcagattgatgtgctcgtaaaagaaaactatgaaaaacagtttttgctcaaagatacaaagtataagatgcttcaggcacagatcaatccccactttttatataatactctgaatgttatccactggatgatccgggccaaagaaaatgaaaaggcgagtcggatgatcgtggagcttggggcactgcttcgggccagcttcgatgaaaatccgtacataacggtagaagaagagatcggtatgctggagaattatctgaagatccagcgttatcggtatgaggacagagcggattttgctgtagagaagaacggaaacccgggaaagtatatcatgccgcgaatgacgctgcagcccctggtagaaaatgcgattttctatggggcggatcaaatggaagatgtttgccacatcaagattacgattacggaggaagaaaacaatattttatttgaagtgaaagataatggtcccggaatgacagaagaagagctggaaggagtacgcaagtttactgtcaaacccaagggacatggaattggaattaaaaacatatacgaacggctgaatattacatacgaggcgtttcagtttcagattgaaagtaaagtgggaaaaggaacgctgatccggattcgggttccaaagctgagaacagaggggaagcagaatgtataaacttttgattgtggatgatgaaaaatttgagagagaaggcatggcagaattcattgcatgggatcactatgatattgaagtggtcggtactgcatggaacgggcaggacggatacgaaaaagtacaggaacaaaagccggatattgtactgacggatattaagatgcctgtaatggacggtctgggtctgatccggaaattaaaaacagagtatccggatattgagatcatcgtattatccggctatggagaatatgaatataccagtaaagcgatggaatacgggatcaagcattatgtcttaaagccctgtgatgaggagaagatcatcccgatcgtagaaaaagtaaaggaagaaattgataaaaagcgaggggaaaagaatcgcacgacaacgatacagaaattacttcccctggcaaaagagcagatgtttcgaaatattcttttgaatcgggaaatcacacaaagagaatatacagcttttacagaagaggttgatgcaaatgcagagaacgtacgtctgcttggctttcggaatcccaggaggcgctttgatactctggagcagttcgtgctggaaaacatcttgacggaattgtatggaaatgaagaagtgtttctggaaacttccatcagtgaagatgtcttgtttttgatcgacggtaccgatgtacagaaagtagaagcaagtgtgaaacgcattctgctggaattttctcatatcagtcagcagccgatacaagtggcattaagtgacagtggaaatatagaagcagtcagcaggctatatacgcagatccgggaattattccgtatgggggaaatttccggacagcaggggctgctgcagccggacatattttcggtatatgaggagagttcgtcaaaatttttccggtatcgggaattgcagaaggcggaagattatgcgggtgtgttatttgaagtgtatctggcaaatatgaagatgaattacagaggactgaatgtacagcagaaaaagaaaatttatggtctggcgtatgaagttgtctgtgaggagaaaaagtgtccgtcagaatttgactgggaacatgcagaagaaggggaatggggattgctctgttccatgacggatctgatggcaggcctgaaagagatcgatataagttctggaaaagagcagatccgtatgcggcagatcctgcttgcagtttatgaaaatttccagaatacagaattgagcatccggtatctggccaaagaggttctatatatgaatgaagaacattttggcagagtgtttgtacggtgttggaatctgaagttttcgacctggcttcgaaaagtccgcattgaacttgcaaaagcgatgatcgcctatgtgccggacattcgggtctccaggctggcagaactggttggatattcaccggatggtcagtattttagtaaagctttccgtatggagaccaaaatgtcaccaacagaatacagtgagcagtttaaggagaaaaaaaccgacggttaaaaagtcggtttttttcagattaatactcttttaattccatttttattcttataaattaattataaaatgaatacatcaaaaataaaccgatagaaaatcggtgaaaacaggaggaaaagagtatgaggaagagaatgaaaaagattgcagctctgcttcttacgggagtgatggttgccggcctgacagcgtgcggcggtggagatgcaaaagaagaaaaagcagcaaaatcttcagacggtaaaacgacgatcaagattacatggtggggcggtgataccagacatgagtatacccagaaactcctggatgcttatacagcagaaaatccggatgtagaatttgaagcaacacctgcaggatgggaaggttattttgacaaactttctacacaggctgcatcaggaagtatgccggatattatccagatggattatctgtatattgcaacttatgcaaagaacaactcacttgcggatctgtccgaatttgtagaagacggaacactggatatgtccaatgtagaagaatctacattaaagacaggcgagatcgatggaaaactggctggtatcgtagcaggaaccaacgcacttgcagtaacatataatccggatgtactcaaagaagttggtatagaggcgccgacagatgactggacatgggatgattatatcaaattgaataccgaagtatcaaaagcaaaaggaacagaaagtgccctgacagcgacgatcggaccatgcggagacatgaacttcttcaattattttgtaagacagcatggagaaacattgttcaatgaggatggaacaggacttggatttgatgatgactctatcacagcagattatttccagatgtgggcagacatgacagaggcagatattgctccggatcctgacgaacagtcacagatcgcaacactgggaattgaaacacttccgatcgtaacgaatgaagcagcaacgacacttgagtggaacacatatccaaacaaagttgcaggaacaaatgataagttgaaactggctcttatgcctggtgcaaacgaaaataacgcgatgtggctgaaaccgggtatgttctggagtgtatctgaaacatccaaagtaaaagaagaatgtgcaaaattcatcaactggatgatcaattctgaagaagcaaatgatatcatcatggctgagagaggtgtgccgatttcttctgaaattcgtgattacatggtaaattcaggaaagatgtctacaacacagaccgagatgttcgagtatgtagataaggtaacagagattgcaggggaatgtccttcagctgatccaggcggaatcgcagagatcaacaaagcatttaacgatgcaggaaacagcgtacagtatggacaggcaactgcagaagaagctgcaaaaacatttagaaagcaggctactgaaattctggagagaaataacggataatgtgacggcttaggatgaaggggcttaaaaaagccccttttctttgtcacagcaggaagaggtataaattatgaagaaaaagaaagtgaaaacggtatataaacgccgggacaatattgccggatatgcaatgctcgcaccgtggctgatcggatttgtcctgatgtggttcttaccgatgttgatttccatctattattcatttacggattttaatcttttgaatgatgcgcagatcattggatttaaaaactatattcgtatttttacgagtgatgatacattctggcaggcattaaaagtaacatttatctacgcgctgtttcttgttccgcttcgactggcatttgctctgattgtagcgatgcttttgaacacgaagcacaaaggactgggactttacagaacgatttattacattccgtcgatcatcggaggaagtattgcagtctctatcgtgtggagacagatttttggaaacaagggagttatcatgtccctgttgtctttgtttggaatcgagcagaaagtttcactgcttggaaatcctaaaacagcacttgcggtgatcattttaatgggtgtatggcagtttggttcttccatgttgattttccttgcagcattgaaacagatcccgaactccttatacgaatctgcaatggtagacggagcaaagaaaatgagaattttctttaagattacgcttccgatgctgacaccgaccatctttttcaatctgatccttcagatggtaaatggattccgtgtatttacagaaagttatgttattacggacggaggtccgctggacagcacactgtcatacgtactgtacttgtatcgtcgtgcgtttacctattttgatatgggatacagctgtgcgcttgcctggatcctcgtattgatcattgctgtatttacagttattttgtttaagacacagaagagctgggtttattatgagtcaggaggagatgagtagtcatgaagagtatgaagaaaaaaagacaggtggatgcggtgatatttcatctgtgtgcctgcgtgatcggctttttgatgatctatccgatgttatggcttctggcaagttcattcaagagcaatgaaacgatgtttacaaatacatattctttgatcccggaagtgtttgatgcagtgacgaactacaaaagtgcgtgggaaggtgttgcaggagtttctttcctgacgttccttggaaatacagtgcttgtcacagtagttgcaatggtgggatgtgtatttatttccctgctggctgcatatgcatttaccagaatcaaattttacggtggtggtttttggttctcctgtgtcatggtcacattgatgatcccatcacaggttatggttgttccacagtatattattttgaaaaaaatgaatctcattgataccaggattgcattgatccttccatggttcttcggaacagcattctttatctttatgctggttcagtttttccgtgggattccgaaagaactggatgaggcggcagagattgacggatgtggcaagattggaattttgttccgcattcttgttccggttgtaaaaccagcgctgatgacagcatcgatctttgcgttctactggatctggcaggacttcttccagcctctgatctttatgaacacaacagagaagtttacattatctttggcgctgaatttattcctggatccaaatacatataacaactatggtgcactgtttgcgatgtcactgttatccctgatccctgcactggttatctttattatattccagagttatctggtagaaggtatcgcaatggatggtatcaaaggctaagaagaggacgatgagtatggaactggcattgaatcacaatttaaaaatagtatccgacatttcttccaaagcagtcagacatgcactggaaaatttgaaacgagatatagacaacacctgttgtaaaacagaaaaagaaggaatagagctggttcttgagcaggaggcactccacaaggagtgtttcctgctcattgaaaatcaggagaaaaatcagcttattttacgttcgggaagtgatcttggatttgtatatggaatttatgagatcagcagagaaatccttggcgtaaccaatttctggttctggaatgaccagaaattccaaaaacaggagcagtatgcgattccggaaaattacaaagtggaatccagaccatttgcagtgaagctgcgcggatggtttcttaatgatgaagtgctgctgaaagaatgggaagtcgactataaaaaagaaaagccttgggaaatggctttggaagcactgcttcgatgcggcggaaatatggtcattccgggaacggataagaattccagattgtatcgcaatatggcttcggatatgggtctttttattacacaccatcatgcagagccattgggggcagagatgtttgcacgggcgtatccagatctggaggcatcttatgatgtacatggagaaaaatttcaggaactctggaagaaagcaatggaagaacaaaaagatttgaatgtagtgtggaatctgggatttcgtgggcagggagaccggccgttctgggaggatgatcctgcctatgcgacaccgcagacaagaggaaagctcatggggcaactgatccgcatacagtatgagctggtgaaaaaaagtctgccggatgcagtctgctgtacaaatctgtatggagaaacgatggagctgtatcagcagggatatctggaatttccggaggatgtgatcaaaatctgggcagacaacggatttgggaaaatggtgacgagaagacagtggaatcataatccgaggattcctgccctgccgcagagagaaaaaggcggaagccatggaatttattatcatgtatctttttatgatctgcaggctgcaaatcacattacaatgcttccaaattctccggaatttgtaaagcaggagctccagaatgcgctggagtatggctgcagagattattggatcatcaacagttcgaacattaaaccacatgtatattatctggatttgattgcaaatatgtggaaaacaggagatgtagaaattgaagcacatcggatggaatatggcagaacctattatgggaaggaaaatgcagaaacaattgcgcgctgcctgaaagcatatcatgacagcgcagttctgtatggaccaaatgaggatgaccatgccggagaacagtttacaacacatgtggggcgaatgctcatctcacgttatatgaaagggactatggaggcatcggaagatttaaaatggatgacagatgcaaaatctctggaagagcaggtactcgtatatcagaaaatctgcagagaaggtgtggacagttaccggaaatatctggatctctgtgaagatgcggatgcgcatatgacgggcaaagggaacagagaattgtttcgggattctctgatgctgcaggggcagattcattatcattgcttttgcggagcagaatggatctgtgagagcctgctggcagctgtgaaaaaggagtatcagagagcgttttattacggcggtatggcaagagaagaatacttgaaggcaaatcaggcaatgcgggaacgcgaacatggaaaatgggtcgggttctatgccaatgaatgtctgaccgatgtgaaacagtccgcctgggtcttgaaaggatatatgagttatgtgagaaatctgggagaaggaccggattttcatgaatggcagagagaactgacatattcggaagatgacagaagagttatgttgatcttgatgacggagaatcatttggaagatgcagatatatttcaatggatgaaaaaaagagaattatttggagaataggccgatgggaattttatcaggaaaaaaagtattgacgtttggagacagcatcattgacggtcatctgtataaaaaggcggggttcatggaatttgtggcagaacaagagggcatgagtgtgaaaaaatatgccaataatggcgcctgtatactgccgggaaatccaatagatgaagccgggcttggcgggatgattttgcgtgatcaggtggaaaaggcagcggcaaacaacgagcgggcagattatattgtttttgacggaggaaccaatgatgcgtatgcaccggtcctggacatgctgggagatgtcagtcagaaaagtgtggagacagatacgtttgcaggagcattccgaaaaaccgtcgaagcgattcaaaggaactggccaaaggcagttgtcatttacgtagccgtacaccgccttggataccgggacagggatgtacaaaaggcactgcatgagacggcgctgaatatttgtgcagaaatgggagtacaggtagccaatttatatgatgaatgtgaactggatactgcagatgaagcaatgtgcagaaagtattcgtttgatatattaaaagcaggacttcctgcaccggggaaaaatcctacgggaacgcatccgaattttgctgcaattgaaacgtattatctcccttttgtatcggaagtgctgaaaaaagcagaagaatttcggatgggaaacgtacactggaattcgtttgatgatgagatcgcactttggtgggagcagccgaaaggtacaaaaaacggaaaattccattatcagatcgaggtgaatggaacgtggacaggagaaacaaagaagtcccattattgtatgaagaatctgcaggcagatacgcaatatgatgtgaaaattcaggcaatgcaggggacagaagtatgtcagacggttcgtctgtattgtaaaacaaagaggaaaagaacacgcctggatgtaacacaggcgccgtactatgctgtgggtgacgggcgtactatgaatacaggagcactgcaaaaagccctggatgactgtacgaacgagcagacggtttatgttccaaaaggtgtgtacttgacaggagcgctgaggatgcacagtgatatggaactttatctggaagaaggtgcagtactcagggggacagaagtaccggatgattatcttccaagaatctggagccgatttgaaggcagagagatggaaactttaagtggacttctgaatctgggtgaactggatcataaggcaggagcgaccagtgaaaatgtggtgatccgtggaaagggtacgatagagggaggtggaagagttctgatggaacgtgtcatcgaggaagaaagagttcggctgaaagaatatctggaagaactgggtgataaaattctggagtgtgagaatctggataccattcccggaagaatccgtccgcggctgattcacatctgtaatgccagaaatgtagtgatcagcggaattacagtgaaaaacggagcgtgctggaatgtgcacatgatctattcagaagatgtgttgacatatggctgtcaattttactccagagatgtctggaatggagatggatgggatccggattcttccagaaattgtaccattttcgggtgtacttttgataccggagatgatgcgatcgcgatcaaatccggaaagaatccggagggaaatgaaatcaacagaccatgtgagaggattcgtatttttgactgtgttgttgcgtttggacacggatttgcgataggaagtgagatgtcgggtgggattcgagatgtgaaaatctggaactgtgatctgcgcaattccgcaaatggcatcgaaatcaaagcaacgagaaaacgcggcggttatgtaaaagaggtgtatgcagcacattgtgtacttccaagaatcttgttccattctgtcgggtataatgacgatggaatcgcagggccacatccgccggtattggaacaatgttgttttgaagagatggatattacacgtttgtgtttaaatgaaaaagaaaatcggatggatttgtgtgaagcaatggatctgtgtggattcgaagagaaagaatatcacttgaagaaccttacattccgaaatatccggattgcaaagaacggacagaaagaggatgggattcatcagaagtattgtgagaatttagtatttgaaaatatcagtgtgggataaaaaagaggcaggagcaaatgagctcctgtcctttttatgaaaaggctattatgcgagacaatctttcatgactgcataagtacccttgttttctatttctttgaggatctcagaaacagcagcctcaaatccggcaatctgagtcagatcctctccccagaaatcgatgttggagcagacagcatgcgcataagcgtcagcatcgtcatctttgtgtgcaaagaagaaatccaggacagctttgtcatctttgatctcatattcttccgtgtgattgcgaacaccgatcattgtattttcttccatacggattccgcgatagaaagcggcataaaaagcgaaagacgcagtgatgcatgtcggaagtgtgtgatacttctcgatgtagcctttcaaggacggcataacacgggctttccattttgcagtagagttcagagagatagcgagcagtgcatggtcaataaatgggttttggaaccggtctgttacagatgctgcaaagctcatcagttcttcttccggcagggacagtgttggtatgatttcttgatagatcgcctggttcatataaccacggatgacatcatctttcatacagtctctgacaatatcctgtccggcaaggtaagcgccaagtaccatagaagtgtgggccccatttaagatgcgtacttttcgctgtttgtatggtttgtggtcatcggtgatcaggatcggaaggtttgctttttcacacggaaattctttttttatggattgtggaccttcgatgacccagaatccaaaaatttctccggtgtttaatactttatcgatgtaaccattttcctgattcaaagcatctgcatctgaacgcggatagccggttacgatccggtctaccaaagtcgagcagaacaggtttgcctctttgatccaggagatgaaatctgctccgagattccagtcttccgcgtgttttaagacgcatttttccagttcttttccattgttatcgatcaattcacaggagaggatgataaatccttttttactgtttccggcaaatgtttcaaatcgtttgtacaaaaattgtgtcagtttggcaggaaagctgtttgcaggcgtatctgtaaattggcaggacggatcgtatatgattccggcttctgttgtattgcatgtgatgaaacgcagttccggattttttgcacattccatgacagcctcatagtcgctgtatgcatttaaacagcggctgacacaggaaatcacgcgtttggaagagacttcctgcccattttcggaaccgcgcaggtacagtgtgtagagtccttcttgttcattgataaaatctccaacatctggagtcgtgaattttgggatgggctgaacaagcacaactttggagttgaaatcagcggtttcattcattttgtcaatgaagaaatctacaaatgcacgcataaagtttccttctccaaattgcaaaatacgttctggagcatcttttaaaaggtatccgtcataatttaaatcctgtaaggtttgatagtttaactgtttcatagtaaaaaatcctttctgaaattttatcggtatctgattacagagtaacaccctgtttaaaaatggccatatcgtgaaaaccggcttcttcggctttgacaagacgtccggaggcgacttccaggacatattcaaaaagtgcttctcccatttgtccgatggtgcctccatcaacgagtgcaccacagttgaaatcgatccagttgttctttttctgatagagattggaattgctggatattttgacagtcggaaccggtgatgcaaacggagttccgcgtccggttgtaaatagtacgatctgtgcaccggaagctgcaagtgctgtggaagcgaccagatcatttccgggtgcgcttaaaagatttaagccctgtgtccggacaggctgtccgtaagcaagcacatccatgacgggtgcagaacccgatttttgggtacatccaagggacttgtcctccaaagaggaaattccgccttttttatttcccggggaagggttttcatagattgtctgattatgacttttaaaataatttttaaaagaattgatcagatctacggttttttcaaaaacctcttcattctggcagcggttcatcagcagcgtttcagctccgaacatttccggtacttcggtgagaatggtcgtgccgccgcaggaaatcagaagatcagagaaagcgccaacggttggattggcagtgatgccggataagccgtcagaaccaccacacttcattccgatgacgagttctttacaggaaattttttgccgttggaaagtagaggcataatcgcagagctgtcggatgatatgcagtgcagattccacttcgtcctccacttcctgtgcgactaaaaattttacacggtcctcatctacaggaccaatatatttttttaattcgtcgatattactgttttcgcagcccagccccagaacaagtacaccggctgcatttggatgacggatcagatctgccaggatctggcgggtgtgttcctgatcatcgcccatctgcgaacatccgtaaggatgtgggaaagcaacgatcgcatcaacgctttccggctgaaatgttttggctttttcggcaacgagcgttgcaatgctgttgacacagccaacggtggggatgatccagatttcgtttcgaacaccggcttttccatcggttcgtctgtacccgtcaaaaaaacgttcttttgtgggttccagaaaagaatgctctttttggtaggaatagttcagaagatccccaagtccggtcttcatattatgtgtgtgaatccaggatcctgccggaatgtcctcagtggcatacccgatgggggagccatatttgatcacagcttcaccggagctgattttttccagggcaaatttatgtccctgaggaatatcttccagcaaagtgtacatacgtccattcagattcaatacgctgtccttttttaatgaagtgagtgcaacagcagtattgtctttcggatgtatttgaataaatgtgtgctttgaatccataaaaacctccatatgttgttattaatagaaagaaaataaaaatgtaagtagttacaattaaaatacaaccttttttgtgataagtcaatggaaaaaatcacgaaattttacaaaaatattgtgaaaaacgctcataaaagaatgattgactttttattaacgaagaaatataatttataaatgtaagggcttacaagaaaaagggaaataaaaataaacaggaggatgaagagatgaaaccatttatggatgaacaatttctgctgagcacttctacagcgcaaaggctgtatcatgattttgcagaaacaatgccgattctggattatcattgtcatattaatccggaagaaatcgcaaaagatatctgttttgagaatatcacacaggtatggcttggaggagaccattacaagtggagacagatgcgttccaatggtgtggacgaatattatatcacaggagatgctccggcaagagaaaaatttcagaaatgggcagagacattggagaaagcggtcggaaatccattgttccactggagccatctggaattacagagatattttgattaccacggtgtattaaatggagaaacagcagaagaagtgtggaatctttgcaatcagaaattacaggatccatctatgagtgtccggaatctgatccgaaaatcaggggtcacactgatctgtactacagatgatccggcagacagtctctgctggcataaagagctggcagcagatgaaagctttgaggtgcaggtacttccggcatggagaccggataaggcgatgaatatcgaaaaaccggagtatctggactatctggaaacgctttcaaaggcagcgggctgtcagatcgacacgtttgaagatttaaaaaatgcattgaaaaagagaatgaatgcatttgaggagatgggatgtcgtgcaagtgatcatgcattggagtatgtgatgtatgtgccggaaacagaagaaaatctggaaaagattttcgcaaagcgcaaacaagggggaatactgacaagagaagaagaactgaagtttaagacagcgttcatggcatttgcagcaggagaatatacaaaaagaaactgggcaatgcagcttcactatggctgcaagagagacaataatgcagcccgttatgcacagttgggaccggataccggatatgactgcattaataactatgcaccatctgcacagatggcagattttctcaatgcattgaatgagaaacagagtcttccaaagacaatcatttatagtttgaatccaaatgacgatgaagcaattggcacgattcttggctgtttccaggatgcaggagtggcagggaaaatccagcagggctctgcatggtggtttaatgatcataaaacaggaatgatcaaacagatgacatctctggccaacctgggacttcttgggaatttccttggaatgttgacagattccagaagctttttgtcttattccagacatgagtattttagacggatcctctgtgaactgatcggtggatgggtcgaaaatggagaatatccgaatgatgagcggatgttggaaaaaattataaaagatatttcatataataatgcagttcgctatttcggatttgacttaaaagaagtatactaaaggagacaaaatactatgaaacagaatcgtaaaattataccgattacccgtttcgcatatggagcatcatttatcaatattttccatctcagtatctctgggatgaagagtatatttaattttctcgtaaaagtcggtaaagattctttgtaagatattcctatctctattatgcagaaaaaagtaacaaaaaggaacccctatccctcaagattgaggggcaggggagttgaataggcacagcctattttttttatgcaaaaattctccctgtttcatccaagaaaattgctattttcagtaaaagatattcgctaatatctagttagatgctgtacgagggaggaaaatctatggagatgaaaacgatcaaactatggaaaaaggaggagcttacttaccctgtagttggagaatttattccgacgttgactgtgtatttgcacgaagatggcaggataagaccgggatttgtcgttgtaccgggtgggggatatcggcttgtttctccggccgaaggcgagattgtggcaaaaaaattttatgaaaagggattccagacatttgtgctgacatatacgacctgtatgcaaggctctcagcctctgggatttcagccgttgagagatctttcaaaatcacttgtgtggatccgtaagaatgaaaaaaatcttcaggtagatggaaaaagtctcacaatatgtggtttttcagcgggagggcatctgtgtggcagcctggcggtacactatgcagatgaacaggtaaaaatcggcggtgagtatgcagggatatcgaaccgtccggattatgtggtgcttgcttatcctgtgataacctctggaaaatttgcgcataaggactcttttacggctctgctcggagcagatgctccaaaagaagctctggagtatatgtctttggaaaagcaggtaaaagcagatatgcctccggtgtttctctggcatacagcagaagacagcacggtgctggtggagaacagttacctgtttgccggggcatgtaggaatgcgggaatcccctttgaacatcatgtgtttcgaagggggatacacggtctgtcactggcggataagcagtgggtttcaagacaggtcggaggagactataccatggaacagcaggtggcatatgtttcttactgcattgagcatgggatcacattgccggaaccgcttgagaagttgaattcccttcctaggggaagagatatcctgacagcgcttaaggaatgtggacaacatgcgcagagaaaagaggaaccgtctgtgcagatctggccggatctagtggaaaactggttgaaagattttgaggaataaaaggagaaaagagaatgccgagaacagagataaaaatcatgaaaaactgggagtttgccctggaggaaaatggtgaaaaaatcttcaaaaaagttgatcttccccacgactgggctgttaccgctccgtttcagaaagatatggagcaaggggaagcgcagggcttccgcaaacgctggggaacgggctggtacagaaaaaattatttcctgtcggaaaaaaagaatggataccggtattacctgtattttggcgggatctatgagaacagtactgtatgggtcaatggaacagagaccggaggaagaaaatacggatacagcccgttctgcctggatatcacagatctcgtgagagtgggagataatgaaatccttgtgagggtggacaatacagccagacctgtggaccgttggtacagcggagcgggaatctaccggactgtgaaatggctggaactggaggagaaacatctggatgaacggaaggtgatcattcagacagcccgggatggggcggatggagtaatcaccgtagatcctggaacagatgaaagagtccgccttactgtctgtagaaaggataaaacctggcagacagaggggcagggaaaaacgctgtgtatatcgattcctcaggctgagctgtggtcggcggaaaatcctgtgctctatgaccttattctggaactgctggacaatggcaggactgcggatcagatcaggatgaagatcggaatccgggaattttcttttgtaccgggccggggaatgtatgtaaatggcagtccggtcaagttaaaaggcgtctgcctccaccaggatgtgggatgcagagggatagcagtggtacaggagttatggagggaaagactccggacgcttaagacaatggggtgcaactgcatcagggctgcccaccatatttacgcggaagaatttcttgacctttgtgatgagatgggattctatgtctatgaagaatgttttgataaatggaccggaggtctatacggaagatattttgagtcagagtggaagaaagatctgacatgcatggtggagcgggacagaaaccgtgcctgtatttttatctggggtgttggaaatgaagtggagaaccaggctcagccctccatgctgagcatcctgaagatgctgaaagaacatgttgtgagtctggatgatacaagaccggtgacatatgccatgaatcctcattttaagagagaaagtgatattgacatctcgaagatcgaggatattcagaattttgtggatgaggcagacgatacagagatctatgatatggaggaacgtatcgggcggatcgcagcgattggtgagattgtggatatcatttcctgtaattatcaggaacagtggtacgacaagatccatgaaaggatgccggaaaaactgatcctcgggacggaggtgtaccagtttttcaaaggacacgaggatcagattcagaattttatctgtgaaaacccgtctctcgtaccggaaaacagagattatgtgatcggaagctgcatatgggccggatatgactatcttggggaatccatgggatatccgtcaaagggatggagcggggcgctgattcgcacaaacggagataaacgtccttcttattatctgatgcagagctactggagtaaggaaccgatggtatattttgctgtcatggattacagcctggaagacgagggggccaaggaacactgggatatccccatgtatgcagaacactggcatttcccgcagtttcatagaacggttatcccctatatgatcgccagcaactgtgaaaaggtacgtctgttcgtcaacgacagagagtatttccttccggtgcctgcacagtgtcatgaccggatgatcacagggtatatcccttatgttcccggaacagtgacagttataggatatgacggcgggagagaagtatgcagaaaatcattgacaacaccttcatatccggtgcagatcacgtttgatgaaggggaatgtgtggagatttctgcaggagaacagcggatgcttacggtgagagcctgcgatgaagccgggatttcatgtttcagagacagttctctagtaagattctgtctggaagggaatggcaggatacttgcagttgacaacggaaatctgatgagcagtgaaccctatgacgaagagcggatccatctgtatcacggacaggcatctgtcctcgtggaagcaggagagagtggtggcttccagatatccgcatgggcagaaggaatgaagcagggaaaagtaaaatgtgttgcaaaaggaggaaatgactatgaagagtgaaaagaggcaggtttttaatccgttcctgccgtcctatgaatatattccggatggagaaccgcatgtgtttggtgacaggctctatctgtttggaagccacgaccgttttaacggggatgtgttctgccagaacgattatgtatgttattcagctcccacggatgatctgagcggctggaagtatgagggagtaatctaccggagagatcaggatccgagaaatacagacggaaaacattatatgtgggcaccggatgtggcaaagggtcctgacggaagatattatctctattactgcatggatgtctttcccgagatcgcggttgctgtcagcgatacaccggcgggaaaatatgaatatctgggattggtccgccacgcagacggcgagatccttggctgcagggaaaaagattatccgcagttcgatccggccgtttttgtcgatgaggatgggaaaatctatctctattccggaaatggggacaaagaccgggagcattattcatacagaaattctcaggtcatgcgcctatcaggagatatgctgacgatcgaggaagaagcgaaggttctgatcccattgattcataacagtgaagggacgggatttgagggacatgaattttttgaggccagttccatgcggaagatcaacggaaagtattattttatctattccgacatcaacagtgcgtctctgtgttatgctgtgagcaggtatccagataaggattttcagtatggaggagtgcttgtccatatcggcgatgttgggattgacggcaggacggaagaggaggctctgaattttctgggaaatacccatggaagcctggaatgtgtggaaggaatttggtatgttttctatcacaggcagacaaacagaacgaatttcagccgtcaggcctgtgcggaaaaaatagagatccagccggacggaaggatcagacaggcggaaatgacatcatgcgggctgaatggaggtcctctgcagggacaggggagatatgaagcaaggatcgcatgcaacctgcgagccaaagacggtgtagtcatatcgaaaaagatgtatatggatgaacggttcccatattttacccaggacggcgaagaccgggaaggtgacccgaaccaatatatcgcaaatgtcaaagacggaaccatggcaggattcaaatattttaaactctcccgaaaaggcgggatcgaggtaagagtaaggggtactgcagagggaaagttccttgtctttaccgatgacagagagaagatcggtgagatcatgatcagtgtggatgccggacagtgggagaactttttaggagaatattcgcttgatacagcggatcaggagaagacaacagcgctgtattttgtgtttaagggaactggaaaaatagatttctatgatttctgtatcagataaatgtggagagtaatatgaaattcgatgttaatgaagaagagataaaaacagttatcgggaaaacagcagaccggacgatgaagatggatatgacttgggactggccgtgcggagtggcatactacgggatatgcagggcttatgaagctactggagaaaagcgttatctgtcgtttctgcaggagaggatcgatgaatttacagaacttggcctgccggaatcgtggacagtcaatacctgtgcgatggggcattgtctgatcactctttatgagaatacaggggaggaaaaatactggaatcttgtcctgagcaaggcagattatcttagaaaccaggctcagaggtttggacaaggtaccctgcagcatacggtttcgggaaaaaatgatttcccggagcaggcgtgggcagacaccttgtttatggcagcgtattttctgctgcggatcggagtgaaggtgaaagacgaggagatgataaatgatgccttggatcagtacttctggcatatccggtatcttcaggatctggagacagggctctggtatcatggatacgataatatcggcagaaataacatgtcaggtatctattggggccgtgcaaatgcatgggcatcatatacaatggccagagtggggaaaatcctgccggaagcatatttgtatccgaaatatatggatataacaggttcgctgagcgagcagttgtctgcgctgaaatttctgcagacagagagaggattatggagaacgatcctggatgatgaagattcctatgaggaggtgtcggcatcctgcgggatcgctgccgcgatgtatatcaatggcaatccgttgtacatgaaatatatcaggcgtgctcttgcgggcgttctggacaatatcagcaaggatggaaaagtgaggaatgtctcggctggaacagctgttatgaatgacaaagagggatatagaaatatctcaaaagactggatccaggggtgggggcagggacttgccctgacattcctggcagagatactctcaggaaacagtggacaataataaggtgatagaattttatgtgtttaaaggagtatatcagaagatgaagagtaagataggatttactatgccaggggagtccgggtacgagaaactgacccttgaactggcagaaaaatggggagcagacgtgatccgtgacagtgatgggacaacgctctccgatgagatcgttcaggcgggatacggtatctattcgactgtctgcatgattcgagatcacaatgactgggcgaaggaacactcggataagcttcagcagacttttctgatctcaaagccggttacagcattatcggatctggcagtgatccctctgctggatggctattatatggagcagttccgtgtcaatgggagcagagagtcacgaaaatactggcaggtatttgaccgcacagtaaatgaggagatccccgcagaaaactggaagtatgacgaggaagaaaaggcggtcactgtgaagaataccgtgccgtttcaccaatacacggtgaattttatggcttacaggatttgggaagagatctccatgtacaattatgtgacaaataactgggacaaagagcatctcatgcctgtggatcctagagcagaagaggcgcaggcatatctgtaccagtggctggatcaatggtgcagaaaccacccggatactacggttgtccggtttacttcgatgttttacaattttgtctggatttggggaagcagcgaaaagaaccggaatctctatacggactgggcatcttatgactttacggtaagtccgcaggcactagatgattttgaaagagagtgcggatatgcgctgacgtcagaggattttattgatcagggcagacttcacgtgactcatatgcctccgacaaagaagctgttggattatatcggatttaccaaccgttttgtagtgaagtttgggaaaaagcttgtgaatctggtcaaatcatatggaaaaaaggcatatgtcttctatgatgacagctgggtggggacagaaccatatagcagtctctttccggaatttggttttgacggaatgatcaaatgcgtcttttccggctatgaagcacgtctctgtgcaaatgtgaaaacagaggtccatgagatccgtctgcatccttatctgtttccggttggactgggcgggaaaccgacattttcaaaaggcggcgatccggcggaagatgcgaggcgctactggatggcggtccgcagggctctgctccgccagccggttgagaggatcggacttggcggatatctccatcttgtgcaggactatccggattttgtggattgtattgcggaaatatcagaagaattcagaaaaatcgtgttgcttcatgaagaaggaggtgtatatacctgtcctgtcagggtggcagttttgcacagttggggagctctgcgttcttggagtctgtcgggacattttcacgagacgtacatgcatgatctgatccatgttaatgaggcgctttccgggttcccggttcaggtgtccttcctgggatttgaagacattaagaacggagctctggacagtgtggatgtgctgatcaatgcaggagcagcagggactgcctggagtggaggagaccagtggaaagacgatgaagtggtggaaaagatcagccgtttcgtatatgagggcggcacgttcattggtatccatgagccgtcggctgtgcccggctatataaactatttcaggatggcagaagtgctcggagtggacaaagatacaggagcgagaacctgccacgggcgatggccggttgaggaaaaacgtgaatatgaaaatgcccggatcccgaaagaggaaggagtctttctgctgcatgacaaagtggaagtattatgtgcggaaaagtcggagatacgggaagaaaatgtccccactctcaccgtaaatcattatggaaaaggacgagggatctatatgtctcacttcagaaagggaacggaaaataaccggatgctgcttgagcttctgctctcgggaactcatgaaaggacagcctcacttcctgataacccggcagtggaatgtgcatatttcccggagagtagaatgatcgtggcagtcaataattcggatcagtctcaggagaccaggatttgcgtggaaggacgagaagtctctgtggtcatcgcgccttatgggagtaaggcagtttccttgtgaatgaccggtaaaaaaggagaatggacagaaatagtatcaaaaaaataacggatataaaaaaatgataggttttacccaaaaaaaattatatttatcagacatacagagcgatacaataaagacacttaagagagaattaagagaggagaatgaagaaatgaaaaagaaaagactgatggcatgcctgctggtcggaacacttgcagtaggattactggcaggatgcggaaacgggaacgcacagaatgagagcagtgaaggaaacagcgatgggaagaccacgatccgctttgcatggtggggcggacaggaaagagcggatatgacaaacgaagctgtaaagctgttcatggaaaagaatccggatattgtagtagagacaagcttttatccctatgattcctactatgaaaacctggcaatcgcgtccacatccgataatctgccagatgtaatgcaaagctatattggggcgtcagaaatgcaacagtttcaagatggcaatctattggaaccaatggatgagtatgtggaacaggggttgatagatttgtcgtctatctcggaaaatctgatcacggaaggaaaagtggatggaaagctttatggactgccatttggaattaacacccgggctatgatagtggatccggaagtctacgagcaggctggacttgagatcccggagaacggatatgagtcttttgaggcaatggaggttgatcttgccaagatacaggaagttacaggaaaatacgcatccatggatttcttccggcatgctggcgacggtctgaaatattactgcagactgcagggcgagacggagttcggttctgagggggacagcctgatcggattttccaaagaaacgtttgttgatttctacacaatgagattaaagtgggctgaaaatggttggatcccgccgtatgatgttacgatggcagaaaacggagcagaggacagtacgcttgtcaaaggagaatcagcagtagggatcatcccggcaaaccagttcgcaagttatgaggaagcaacgggcaaagacctccagatgatcctgctcccgggagcttccgtcagcgaggcgacaatggttccggcaagtgcacatctgtctattgcaagcacttcaaaaaataaagaggcggcagcaaaactgatagacttcctgctcaatgatgaggcggcaaatgagattctgcagacagagagaggaatcccggcagcggatgacatccgtgaggctatggctcccagctttgatgcgacaacaaagaaggtatcagatattgtggataaggcgctggagtacagctcggcaaatgatcttccgccgatgacaggtacttccgatattcagaaactgatcgaagaatatgaagagaggatcatgtacaaagatgtgactcccgaagaggcgtatgatgcaatagcggaagctgccagtgtgaactgacaggaaaatgtgcgggagcgacggtgaagataccgggctcccgcatattttgtacccatttttcgctgtggttggaggtaaatatgaagaaaaaaagattttttgagctttatggcggatatatcttcgtggcaccctggattctgggatttatcctgttgacactgatcccgtttatctgcctgctctatttttcctttacggactttaatatgttcacttcgccggtgtttgccgggcttaaaaactatattgaaatcgttacgcaggatgagaaatttatcatatctctgcgggtgacatttatctatgctttaatctctgtgcccctgaagttgatcgccgcactactggtcgctgtactcctgaatcagaaaaggaggggaatcgggatttacagaacacttttctacatcccgtccattatcggcggaagcgtggctgtctctgtaatgtggagaaatctcttttcccgtgacggtgcggtgaatgcactgatcgaggcgcttaccgggatcaatgtagatatctcctgggtggcagatccgaatacagctctgggctcactgatcctgatgtcaatttggcagtttggttccccgatgttgatctttcttgcaggactgaaaaatatttccaccagttattatgaggctgcgaaagtggatggtgcaaacagcatacagtgtttctttaagatcacgcttccgcttctgtcgccgattattttctttaatctggtgatgcagatgatcaatggatttatgacattcactcaggggctggtcgtaacgaacggaggaccgatgaatcggacactgttctaccagttgtatgtatatcagcagggatttgaagactttaatatggggtatgcatctgctctgtcatgtcttatgtttgtgattgtcctgatccttaccctttttgtattcaagagttcggatgtctgggtatattatgaaagtggagggaagaaatagtgaaaaagaaaaaaacaataggaagtgtggcgtttcatcttgtctgtatactgtttgcgctgacagccctctatcccgttatctggatggtttccagttccctgaaagacagctctcaggtatttgtggatgcgggaaatctgattccctgggatttcaagattgaaaattacataaaaggttggagcggttttggcgggatctcattttccacatttttcagcaatacgatttttgtagtactgctctgcgtactgggaactgtggtgatatgcccgctggtggcttacgggtttgccagactgaatttcaaaggaaagaacctgtgtttctttacggtcctgatctccctgatgctgcccggacagattgttatgattccgcagtatattatgtttaacgaactgggatggctggatacatatctgccattgatcgtgcctgcatggttcggaactgcatttttcatttttcagcacatgcagttcattcgctctatccccgcggaactggatgaggcagcatatctcgatggtgccgggaaatttacggtctatacaagagtgatccttcctctaatccgtccatccatcgcaacgtcggtcatcttccagttctactggaaatgggaagatttctttggccctctgatctatctgacttcgccgaaaaaatatacggtatccgtggccctgaagcttttctcagatccttcatcgatgacggactggggagccatgtttgccatgagtgtggcgtccctgatcccgccggtggtcctgttcttcttcttccagaagaatatcgtgggcggcttaagtgccggggcggtaaaaggttgatctgacaggatgataagctgctgcttttatgagcatttcccgatgtccatagcggcagctttggccgtatataaataggttgagttttgcagggtttgttcttataattagattaaagcaggagggaggagattgcatgagaaaatacaggaaagtgatcctgttcggtattatcttgacatgcctgtgtaccggatgtaaagggttggagcaggagatcaaagatgaccggaagaaggaggaaactgtactggaagtctatgccgggcagagcgagaaagagagccttagcctcctggcagagtcgtttgagaaggaaaatccggaaatctccgtgaatcttcattttatccctgattcagaatatacacagcagatgatgaagatcaaaaatcaggaggcagaggcagactgcatcttcttcccggatacgggggaagcgatcctgtggcaggaaaaagggatcttaaaagatctgacagagtggtcggaagacagccaggtactctcctattatcagaactggtatgccaacatggaggaagacgaaaagtattcgatggtaccctaccggatgggcaggatctgtgtgtattacaacaagacactttttgatgcacaggaaatctcatatcctgaggaggggtggacatgggaagagttaaaagagaccgcagtacagctgaccggatggtccggaaatgagaaggtatacggagcgccgggatttgaggcctccggatactggtgggcgctcccggccaggacccggggagcggtggacccgttccgggaggaagacctggcggtgtttcaggaaactgcacagtggtgccatgagtttactagtgatttttcaggcccgttttcctatgctgagtggagagacgacgtagaaaacaactattatacactgttcctggagggaagactggggatgtttttcgggaacgacacagaggttaagacgctgaaccaggatatacaggaacagggactgtctctggaatatgatattgcacctcttcctgcatggaatggaggggaatatacggatgtgttcaatacagcggcagcttcggtggcggaggcgtcggctcatccggatgaggttttccgttttatcgagttctgcacgggagagcagggggcaaaaatactggcagagaataataccgttccggcatggcagacagatgaaatctgcgagatctatctgggctctgcagaaaatccggccggcagagactattttctgatgagagaggtcccggccgagacagcagtgggaatattgtatcagggcgggatggagatcatgagacagcaggtgtccctttatctgatggatcagcaggaactggaatatacatttcgcaatatccgcagggaacttgaagagctgagtgaactgaactggtaaaaatacccgcaggcaggtggaaagatgaaaaagaagcagacccttacaaaacggtttttgaaatatctgattttgatcattatcggttccgatctttttgtggcaatgtttttatatgggatcatgcgcactaatgccatgaaccaggcggagaacctccggcagagcctgatggaatccagtataacgatggtggaacagtattttgaggatatcaataatatcgccgacgctattatttacaaccgggacatcattgattttatgagaagtgacatggatcttcccggagatatggcgctgctgcggggagtggaaagccagtattactattcccacccggaactgacgatcagtttttataaaacaggaaaatggacgagccgttattcgatcgaggagagcggacgggcggttcccatttccgattaccgctatacagactggtaccaggagatcatctggaaaagcgggaaaaatattctcatgaccagtgaggagggggaaggggttttccagacctatgtttttaaaattgaagatatctacagcccccacacggtcgggtatctgaagatcgatatggatatgaatgatctgcgggaacgatttgtacacagttttaatcagatcgcaggggcgacgatcatggataaagaaggaaacgtcctgttctatgacaagatggagattgatatcccattgggagttctggaagcaaatgaggaaggaacttgggaggacggagattatatcatatcctacagtacggaagagagtacgggctggtatttgtgcatggccagttccaaggcagagatcatgcaggcgcagaaccagatcattccggtgcttctgctgatccttgtggtgatcctggcagtgactgtgctcatttccggtaaatgtttttccgtgatcacagtgaactttaagcgcctggtcagcgggatggagcaggtaaaaaaaggcgatctggatgcccgggtggaggcggatacccaggatgagattgccatcctgatccgggaattcaacgatatgatgcagaggatcaatgatctgatcaaacgggtggaatccgagcagctcctggtaaaagaggctgagatcaaggcacttcagcagcagatcaatccccacttcatctataacggcatggagacgatcatggggcttgcgagcgagggcatgaaccaggaggtcatcacagtgagccggtgcttaagcggacttctgcggtataatacaagatttgagaatgtgaccgtgatcgcccgggagctggaacagattcagaattatgttacggtcatcaagattcggttcgaagaccggtttgaagtgttctacgatattgacgacgagtgtctggactgccgggtgctcaaattcacactgcagcctttgctggaaaatgcggtatcccacggcctcagtgaaacttactcgggaggcatactccggatccgtatcaaaaaggaagaggacaaagtacttcttatggtctatgacaacgggacagggatcgagccggagaagctcaaagagctgaacgagagactcaaggtgacagaagaacatcccctggagtacatcgaacagtataagagtctgggaatattgaacgtgcacctgcggtcaaagctgttttatggagaagggtattctctggagattttcagtaaaccgggaagggggacctgtattgcgatcaagatcccctatcagccaatagagacaaaagacacaacggacagtatgatattgagagggggatgattatgtacagagtgatgattatcgatgatgagaagtatatacggaaaagtatacggaacaggatggactggggaaaattcaagatcacggagattgaagaggcagggaacggagaggaggcgctcacacttctggaagagttcaatccacagatcgtcctggtcgatatccgcatgccgaagatggacggtctggcatttatcgaggaggcaaaaaagacgcatccggatattgattatgtgatcctgagcgcatacagtgatttttcgtatgcgaaaagtgcgatcaagctgggggtagaggcgtatctgctgaaaccggtggacgagaaagaacttggaaagcttctgcaggagctgctgcacaaaagaaaagaagaaagattaagtcgtatatccagggatgttcaggcggaaccgggcgggccggaaatcccgcttcaccataagtgggtgactgcgttggcgttttattcagaaaaagatgaagagtatggtgctcggatcgaagctgcgatgaaggcggaaacagaacggcatcagaactatttttcctactatctgcgggattgttcgcgaagcacctgccatgtgttcctgcttaatacggaggcaggcactcaggagctggcgggaagctgtgcggaaaatgtcatggagtggattggagatccggagcttctggcagcggtttcaaagacctttgagcgcggtggtctgcagaaagcggtaacccagagcatcagttatttgaaacggaaaatattccagccaggaaaacgtctgatctcacactcggtctgggagaccagagattatacagaggcaggaaggaaattccggcaggatcttgaacgggtgtacggacagatatcaaagggcgagtttgagtgtgtgaaggatgaactgggagatcttgtggacgctcttctgacagagcagaattcgatcgcctttatcgaagatgggatcgatgagatccttgtgctcttaaagcatctgcccaatgaggcgagcggggatatggatttcaatgtcctgttccatgattttcgcagtaaagattatcttcttgtgtaccatactgtggatgaactgcgggagcggctacagagccttatccggcgcctgatcgatgtggtaatgcgcagagaaagagaagatgtggtggagaagatcaaagactacattgagagaaactacggggatactctgagtgtatcctggctggcagacaagtacgggttaaatgtaagttatctgtccacgctttttaaggagcgcacagggatcaatttggtctcttatatagagggaatccgcatggaaaaggcaaaagaacttttaaagggcagaccgtggtcagtgacagatatcgcgatccatacaggatataccaactcaaactatttttccaaagtatttaaaaaatacacagggatctcgcccagagagttccgtgatgcagagagaaaggcgggagaaaagaaagaatgacagcagatatcgtatataaactgattcgttttgatggacgggagatgaatgaaaatatatcgctggccatccccgacctgacaaacggatttgacgccggactggagacctggtgggaggggatggaaccggtcagtttctatactcccaactgcgtccgtcagggagtctataagattcacgtccgcttaagagcgcttgaggacgcaggccccgtatttatgttcacgggacggaaacagctccaggatatcctttatatgcagaaaggggaaagtctggaaagagagtattatcatgtggtgtcagagtatgtgcccagataccgtcagtacgcatatatggtggagcatctgttcttcacggtctgcactgcagagaaagatgctgttgtgctggaggtgtgtatggcgcaggagtgtgctgtacgggagctcgtgagccgggatcccgcgggaaaatgtacagtgcaggagcaccctctgccgagagttttcctgtgcggggattccacggctgcggatcagtgcggggagattccttatgaacccggagtatgctatgcctcatgggggcagtctcttccggcatttctgggactaaatgcagctgtggataatcaggcccacagcgggaacacaactgaaacattccggaacgacggtcattttgctgtgatacagcatcatatggggccgggggatttctgtctgttccagttcgggcataatgatcagaaacgtgcacatctgcagccggagaaggaatatcggagtaatctgcttcggtttatcgaagaagtgtgctgtgcgggggcggtacctgtactcgttactcctctgggaagaaatatgtggcatacggatggaacatactttgacctgttggaagaatatgctgacatggtacaccgtgtcggagaagagactggaacaagggtgatcaacctgcacgactactctgtgaacttttacaaagagaaaggaaaagaagctgtacgcagatattttcatcccggcgacagcacccacacgaatgaatatggcgcatacttgtttgctgcgtttattgcggaaaaactggcagaatattttccggatatttttccggggataagaccaggagtggattttaaaccccgagggaaccgctgggaagaactgacggcagagaccaaccggaaagaaggaagcggggaggcggaagtctgggaccgtgtggaaaaatcagaagccaagcttattaaagctgtgatgaaggcaagagaagaaagcagatacatctgatacaatatcaattttcaaaaaatctttgagaggaaaaatcatggaacaaaaagaaaaaatggagcagatctctgtcagtatggaactggtctctgtcaggacgacaggtgacaggatctgcatttactgggacataccggagtgttttatggaaggagactgcttcaggatctttctggacgggaagatgacagggcaaacggaaaggacccattgggaatttgaaaatctgtcacctgagacagcatatgatgttcgggtggaatggatgcgggaagaaacgatcctgttttcgcaggaattttccattgaaacgaagaaaaacaaaaagatcttggatataagcaaagccccttattttgctgtgggcgacggcaggacgatgaacacagaagccattcagagggccgttgatgactgtacggaagaggaatgtgtctatataccggaggggagtttccttactggttcgcttactcttcacagtgatatggaaatttatctggccgagggagcagtgcttcaggggacagacagagtggaagattatcttccgaagatccccagccgttttgaaggacaggagatgatgtgctacagcggtttgctgaacatgggaaatatggatcacgccagcgggccgaactgtgagaatatcgtgatccggggcagaggcactatcgcaggcggaggcagagttctggcagagagagtgatcgcccttgagacagaaaatctgaaagactatctggaagctctgggagagaagatactggaatgtgaaaagcccgagacgatccccggacgcttccgccccaggcttatcaatatcagtaactgccggaatgtatatttttccgggatcaccataaaagacggagcaagctggaacgtacatatgatctactcggacaatatcgtgacagaaaattgcattttccgctctaggggtgtctggaacggggatggatgggacccggattcctctgagaactgtacgatattccgctgtacgttttataccggagacgacgggattgcgatcaagtccgggaaaaacccagagggaaatgtgattggccgtccgtcccgtcatatacgcattttcgactgtaaaagcgagagcggacatgggatcaccatcggaagcgaaatgtctggcggagtggaagatgtgatgatctgggactgtgatatgaccagatcccggtgcggaatagagatcaagggtacgaaaaagcggggcggttatgtaaggaatattgttgtgagaaactgtcggacgccccggatccttatgcacagtgtgccgtataatgatgatggaatcggagcaggagtacagccgatatttgaaaactgccggttcagcgggatccagattactggggaatatatcggagatgaggatgcggtaatcctctgcgacccggtggagctttccggattcgatgagccgggtcatgaactgaggaatatcgtatttgaaaatctgatactgggaaagaaagagaacgtgagaaagcagaatatctccttggagtactgtgagaatgtgagttttttgaatatgcggactgcacggtgaggaatctgggggatggtggggagacagtgtgcgaaaatgaggaggggattctgggagcatctgaacttacatatcatgtaaaagaaagattgatacggaaggaggatatgtcagtatcttccgtatcagtctttttgagagactatgaagaaaagtctgtaaataagattcttctatgataagataagggtgaaaggcttgaaagcagagcttttcacccttattttatgtataccatctttggcatacattgacataggaccaaaatcatcttccagtaactgatggataatattgcgtttgccttctgttatttgtaccctatgtacaggtttctttgaaatcgtatatatcggagttatgattccgtacaatatgcttcctgtgaagatgaccagtgattttgcgtagcgtatatacttggctggttcaaaagcgatgtttggtaagattgcaaactttttgggagccgctcttcctggtctgtttatcggaatttacggacaggattccccgacaccatttttctgtacaggacttacttatagagcaatcctgattgtttctatgattcttctgtgtttcaattcctgggagcgtccgtatgaggaagtggaagatgagagtgtggcaaatgtatttgaagggattcaaaaagttgttcattgacatcctttctacgcttcgcattcgtacattccgtgaccatcttggaatgtatctgtttggatttggagcagaatggcttttcacagcgacatttacatattttgttgtatatgtactttcaagaccatctacatttgtgtcagaaatgaacagtttaagcagtatccttcagctgatttcgactttgatttttgtaaaaattgtggcgaaaaaagggttcaagaagccatttatatgggcgcttagcattgttattgcagcaatcctcggatatattggagttgcagtactcaatgttccgcacacgacagttctgattattgcgattgtgatcgtgtttggtttgggtacaggcggtgtatattacattccatggacatcctacacattcatggcagatgtggatgaagttgtaacaaaccgccgccgtgaaggtatttatgcaggggcgatgacaatggccggaaaactgatccgtgcaagtatcgtttatactcttgaatttacagtgacagcgttcggatttaaggaaggagcaagtgtacagctggagtccgcatgtaatgcaatcattggagtgatgctctttggatgctgcggactggcacttcttggaattatctgttctgtcaagatgaagctgacacaggagacacataaagtggtcattgcagagcttgatcgtatccacaatggcggaaaaatgtcagatgtagatccagaggtgaaaaagacgctggaggagctgacaggagttccatatgaaaaatgctttggaaataataatatcggatataaagataaacatcacaaagcagtggcagaataaagaacaaaaaggcgtttcccggtggaggcgtttttttgttctgaaaataaagatatacaaaaaatatagagttatgtataatccaattataaatacaacaggaacggatatggaaggagaaaaaacagaatgaaattaaaaaatatattgatcgttgtgaaagatattgaaaaatcaaagcagttttatcatgacttgtttggccttaatgtggtgcttgataatgatgggaatatgattttaacagaaggtctggtactgcaggaagaaaaaatctggaagaagttccttgaaaaagaaattattccagagagcaattcctgcgaactatattttgaagaacgtgagatagaaaaatttgttcaaaaattagaaaatttgtatccttctatccagtatgtcaatcgtcttacgacacatagctggggacagaaggtggtccggttttatgatctggatggcaatctgatcgaggtgggaacgccgatgtaagtcttgtttgtgaaaaagagtaggcagtgtatggtgacaagtcgcaaaaaaacattgcgaaagaatcaaagagaactggataggtaaattatgattggggtgtcgatttataacgggggttaatcgggttatgagtcggcatttcttttatcctacaaaatgagcgaattctttttttaggcaaatagcagtgatgtacatagaactcagcagaaatacaccacttcttgtgcaattattttttattaatgaccaagacgacaagtctgatattgatggtgcgaaaggaaatgaaacgttgttaaactggatcaatgaggaaattcaatctctggaagaagagcagttcttccataaagattatgatgagacactggtagctacttatggagaagagtacaaagaagaattggttgtagaaggtggaaaaataaaatagcttttaaaatgatggcagaagccttacgctcctgccatcattttgttgtctgcttttttacaatatttccggaaaacattgttctggaaggcggaatttctttctgaaatacctgcatcatctgtgatacggcagtgacgcacatatattctacccggttgtcgatggttgtgatctctggtgtactgcaagcggcgagtacggaattgttgtatccggtcacctgaaaatcttcgggaactcgaaggtgctttttcagtgcgtattttacagcgcctgtggcgagttcgtcatctgcagcaaggacacagtcaaaagaaatgccgtctgcatcgagttgttctaagatagaacatgctttgtgcaagtctcccggtgcggaaaacgcatttttctgagatatgtccagtccatgttccgcacacgaatccaggaatccctggatttttttttgtccgctgtaattgagcgttcggtataaataaatcggggattcagatcctctggagaagaccaggtctgtcatatctttcaatgccatatagtcatcgcagagaatggagtatatattgtctccttttaattctccgtttaagataaaaacagggattttggaagcggcctccagaatatagcggttttcctccggagagttctcgataaagtgagaaccgatcagaaggacagcgtctacattgcgggacaaaagcaggttcaaatagctctgtttctccaaaagctcataccctgtacagcagagcatggatgcataggaattcttgcgaagctcccgctccagataataaattgcctgtgcctggtaaacgtccgaggagtcggaacagagaatcccaacagtgtgcatggaattcagtccgaggcttctggcaaaggcatttggtgtgtagctgttttcttccatgacagcaaggactttttttcgggttttttcgctgactttttcactgccgtttaaaacccgcgaaacagtggcaatggatacccctgccttttgagaaatatcatatatattcataactgaatgctccttaaaaatttcagaaaccaatccaaaatgtaagtgctaacactaattgcaaagaaggtgagtggttttctactataatagcatatgattttccaaaatggtattgtatattttatataaatctgcaggtgattattatataaaatacataattgacaattaaaaaacacaatgataacatacgattgataaggaaataagaatgtgaataggtggaaataaataatgtaagctgttacaatgtattaaaagtatacaaaggagattgtaatggaattaaaagtaatttggaaacatgcacgggcagctgcactggaatgctgtgatggaagcatttatgaaacggaaaatgcatacaggatttatcttaacggagaattttacagagaaacaaaacaagtagtgaatgttttgtatcagttggaaccggaaaaggagtattgcgtttccgtagaacagggagaggaaaaagcggagatttctttttgtacagaggcgcaggactatacggtgaatgtccgtgattttggagccagaggcgatggcgtacaagatgatactttgtatatccaggcagccattatggcatgtccgagagacagtcgtgtgctgatcccggaaggcgtataccggattacaagtttgttcttaaaagatcatcttacattggaactggcaaaaggtgcagtgctttctgcagatacacaacgtgaaaaatttccgatcttaaaaggcacctgtcagaatgaggaaaaaggaaaagagtatatcctgggaacctgggaaggggatgcctgtgatatgttctctggaatcattaccgggatcggtgtaaaagatgttactatttacggagaaggaatcatagatggcaatgcgtcctgggagaactggtggtttgaggcgaaaaagatacggatcgccgcaagaccccggatgatctttttgaaccggtgtgaaaatgtacagattgtaggaatcacagtacagaacagtccgagctggaatattcatccgtatttttccagccatttgaaatttatcggagtgacagtacttggtccgaaagattctccaaatacagatggcttaaatccagaatcctgtgatgatgtggaaattacagggtgtctgttttccgtaggagatgactgtattgcggtaaaatccggaaagatttctgtgggagcaaagtataaggttccctcttcgaatttaaggatccgccagtgctgtatgcgggatgggcatggctcgatcacactgggaagtgagatggcagcggggattcaaaatctgcaggcaagacagtgtgtatttctgaatacagatcgtggacttcgaattaagacaagaagaggtcgaggaaaagatgctgtgatcgacggaattttatttgaaaatatcaaaatggatgctgttttgaccccttttgtgatcaattgtttttattactgtgaaccggacgggcacagtgaatatgtacagtgtaaagaaccacttacagtggatgaaagaactccgaagatcaaagagctttgttttcgggatatccaggcagaaaactgtcatgtggcagcagcgtttttctatgggcttccagaacagaaaattgaacgtgtggagatgaaacgagtacgtgtaagttatgcagaagctgctgtttcggggcagccggcaatgatggatggagcagaagaaaacgtatgcaaaatggggatttttgcaagaaatatcggaacgcttgttctggaggacattcaggtaacaggacaggatggagatgcggtctcaatggatggaattgactgcttggaatggaggaaatagtatggattataatatcaaagagtatggtgctgttgcagacggcgcaaccaataacagtggggcaattcaggcggcagtggatgcatgtacagaggcaggaggcggacgggtcattgtcccgacgggacgctttttaagcgggacgatcgtgctgaaaagcaatgttaccctgtatcttgaaaaaggggcggaattgatcagcagtcttcgtaaagaggacatcctggacttttttggaaacagcgaatttgaagaccccagcgaggcaaccggatgggaaggcggatgttttttatgtgcactgcatgagcatgacatcagtattttgggagaaggtacgatctacggacagggagatcaggtgttttacgatgacggagccgatggtggaatcggagaatgtccgaaaaatgtccgtatagaagatcgtccgagaacaacgtattttgaagatgtagaaaatctgactgtgcgcggaatcacattccgggatgctgcattctggacgcttcatatggcagggtgccggcatgtactggtggatggaatccggattttgaacgatcaaagaggggcaaacaatgatggaattgacccggatacctgtcaggatgttgtgatcagcaattgtatcatcaaatccggtgatgatgcgatcgtagtgaaaaattctgtgcctatggccaaaaaatacggatgctgtgaaaatattgtgatcaaaggatgcgtactatattcccatgattcggctctgaaagtagggacagaaacaggctgtgcaatccgtcatgtaatgttgagtgactgtgtgttcagaggatgctccaggggagttggaatctgggttcgtgatggggcagtgatcgaggatatccatgtgcatcacgtatcaggaaatacaaaaagatacgcagattgtccgcagagagaatttgcaccgcgctggtgggggaaaggagaaccgatctttatcaatgcgacgccaagaaaaaatggtggacatccaggtatcatccgaaatattacgtttgatcatatttctatgacggcagaatcttcattattcatcgcaggagaagaagatgcagtgattgaagatgtcattgtggaaaacctgaatctgacattgaagcagcaggggacacaaaaaccaggagtttttgatgagcagccttcccggagagacgtgtatccgcatgagataccggcaatctatatcagatcagccaaaggagtggaaattcaggggaatatcagacgtgatgggatttataaggaatatccgcttagtcagacagaaaagacagaagatataaaaatttcagtgagggagagatcgtaatgagtcaggtcatacgggcacagtaccgtgctgttgttcaaaagggagtgacgccggagaaaatgaaacaggcttttgcatactgggaggaacagctgaaaaagcagtgttcggaaggtggtgttttgaccggaacgatgtgtcgctatcaggatcagctgtttttgtatctggaatgtatcgcagcagaagagcagcttgcggattctcgacgatggaaggcaaagatagaaaattttgctcagaatattttgggaaatcaggatgtgttggaaatgtggccggtatttgatgtttccggagaacacaaaacatcagaaactggaagattctgggtatacatgtatccagttttctggtttgatgagccaaagtcattggatacatggagaaggacacagaaaccggatgggcggtgcggacggattgcggtgctgcactctgaaaagttattttcctatgtatgccaccatcaggcaatcgttgaggaaggcctgttggtgggagatcgctatcagatgatctcgcagcatgaaaatcttctgttttcctattttgaaacaccaagagatcgagagcaggtgaatatcagcagaaaacaagaagtgtctgaagaaattaaaaaatgggaagctgtggatcctgaaagtcacttttaccatttcccggaggctcatggagaaaactttcttgtgattccgactgtattttcagtagaatcatagtatacagagaaacaagtctgtattatactgtacctatcaataaaagagaggattgtatgatgcaggaattagaactatatgtccacattccgttttgcgtacagaaatgtgcgtattgcgatttcttatctgcaccggcaaatgatgcaggcaaagcggaatatgtggatgcattaaaaaaagaaatacaaagataccgtgagattgcttcatcttaccaggtatcttctgtttttgtgggcggagggactccgtccattttgtcgtatgaacagatggatgagatttttcaaatgctgcgacaggtatttaccatcgatacagacgcagagatcacgatcgaagcaaatccgggaactgtgacggaggaaaagctggaaggatggaaacgggcgggaatcaaccggatcagtttcggattgcagtcggtcaataacgaagagctgaacatgttgggacggatccatacgtatgaagagtttcgagagtcctatgacatggcacggcgggcgggctttgacaatatcaacgtggatctcatctcggccattcccggacagaccgtaaaaagctgggagaatacccttcgtacagtggcagaattgcatccggagcatatttctgcatacagtctgatcattgaggaaggaacccggttttatcaatggtatggaaatgggaagacggatcatgagaaacatcctccgcttccggatgaagatgcagaacggcagatgtatgagcggacagaggagattctggaagaatatgggtttcatcgctatgagatttccaattatgcacgagagggaaaagagtgccggcacaatctgggatattggagcagaacagaatatttagggattggtcttggagcttcttcttttatttcgaataccagataccatctctgcacggacatggcttcttatatagaaaggatcaaatcgggggaagaactgcgggaagaaatcgaagtgctgacaaagaaagattccatggaagaatttatgtttctgggacttcgaaagatgcagggaatctccagaacacaattcgagaactgctttgggaatacgatagaagaaatttatggagacgtgcttgaaaaacttgtgcacgaaaagctcttagagatcacagcagatagaatccgactgacaaaaagagggattgatgtcagcaattctgtattttgtgaatttttgctgtaaacggagaagcagaaaaattgtcctgaatggaaatctcccgaaattatcattgtctggagattgtgcgggactcataaatttttaaaaaacggtacaatataaaaaatataaagaatgtataaacatggttgacaaatacgggacgtggtgctatcttaatatacggaaggtgttagcactcaaaacaaaggagtgctaataagaaaaacctcaggtgagagaaaggaaggtctgatgggattgaatacagaacttggcgagcgtaagctcacgattttaaaagcgattatccaaaactatctggagaccggagaacctgttggttcccgaacactttccaaatacacggatttgaatttaagttctgcaacgatacgcaacgagatggctgatctggaggatctgggatatattttccagccccacacttcagcgggcaggattccttcggacaaaggatatcggttatatgtcgatatgctgatggaagagaaggaacatgagattacagagttgcgtaacacgatgcttgaaaaatccgacaaagtggatcaggtgttgaaacaggccgccagagtgcttgcagcgaataccaattatgcaaccatggtttctgctccggtaaacagccgtaatacgctgaagttcattcagctttcacaggtggatgaagagcagattgtagcagtgatcgtgatgaacggcaatgtgatcaagaataagatcatacaggtcgacgagatgcttggcagcgagacgctcttaaaactgaacatgctgttgaatacaacactcaatggaatgtctatcgaacagatcaatcttggattgatcgcaaggctgaaagagcaggcagggatccatagccgggtgatcagtgatgtgctggatgccgtggcggagattattcatgtagatgaggatatggaaatctacacaagcggtgcgacgaacattttcaaatatccggagctgagcgataagcagagtgctcaggagattatcagtgcatttgaagaaaagcagcagctggcagatctggtaacagagacactggcaagtgaagaaaatcatggaattcaagtctacatcggagatgagactccggttaagacaatgaaagactgcagcgtcgtaacagcaacctacgaattgggagaaggcatgaaaggtacgatcggtatcatcggtcccaaacgtatggattacgaacatgtcatgaagacgctgaaaactctgcagagcgagttggacgcaatttattataaagccccgaaagaataggaaggtgattgctggtggcagagaatatgagtaaagaagagatggtcaaagaagcagtagaagaggccaaagcgaaagcttacaaagaagccgaagcgcaggaagaggatgtagaagaatctgcagaagaggcggatacgcaggaagaaaccgaagaagtttcagaagagacggaagaaaccgaagacacagaagatggatccggtttcatgaaaaaattcggcagaaagaataagaaagataaaaaagacgagaagattgaggaactgactgacagactcactcgtcagatggctgagtttgataacttccgcaaacgtacagaaaaagaaaaatctcagatgtacgagattggtgcgaaagatatcatagaaaagatccttccggttgtggataactttgaacggggaatcgcggctgtaccggaggatgaaaaatccaatccattcgcagagggaatggaaaaaatttacaaacagctgatgactacactggaagaggttggtgtcaaaccgatcgaagcagttggaaaagagtttgatccagatttccacaatgccgtgatgcatgtagaagatgaggaatttggagaaaatattattacagaggaattccagaagggttatctgtacagagacagtgtagtaagacatagtatggtgaaagtagcaaactaataaggaggaaataattatgggaaaaatcattggtattgatttaggaacaacgaacagctgtgtagctgttatggaaggtggacagccgacagtgatcgccaacacagaaggcgcaagaacaacaccgtctgtagttgcatttacaaaaacaggagagcgtctggtaggagaacctgcaaaacgtcaggcagttacaaatgcagataagacaatctcttctattaaaagagagatgggatctgactataaagtagcaattgatgacaaaaaatattccccacaggagatttctgcaatgatccttcagaaactgaaagcagatgcagaaggatatctgggagaaaaagtaacagaagcagtgatcacagtacctgcatatttcaatgatgcacagcgtcaggcaacaaaagacgccggaaagatcgcaggtctggatgtaaaacgtattatcaatgagccaacagcagcagcgcttgcttatggacttgacaacgaaaaagagcagaagatcatggtatatgaccttggaggtggtacattcgacgtttccatcattgagatcggagacggagtcatcgaagtattatctacagcaggtaacaacagacttggtggagatgactttgaccagaagatcacagattatatgctggctgatttcaaagcaaaagaaggcgtagacttgtctacagataagatggcactccagagattgaaagaggcggcagaaaaagcgaaaaaagaactttcttctgcaacaacaacaaacatcaaccttccgttcattacagcaacagctgaaggaccgaagcattttgatatgaacctgacaagagcaaaatttgatgaactgacacatgatcttgttcagaagacagcagagcctgtaacacgtgcattgtcagacgctggaatttccgcatctgaattgggtcaggtacttctggtaggtggttctacacgtattccggcagtacaggaagaagtaaaacgccttacaggaaaagaacctagcaaatccttgaacccggatgaatgtgttgctttgggagcatctgttcagggtggtaaacttgcaggagatgcaggtgcaggagatatccttcttctggacgtaactccattgtcactgtctatcgagacgatgggaggcgttgcaacaagactgattgaaagaaatacaacaattcctacaaagaagagccagattttctctacagcagcagataatcagacagccgttgacatcaacgttgtacagggagaaagacagtttgcaagagataacaaatctctcggacagttccgtctggatggtattcctccggctccacgtggaatcccacagatcgaagtgacattcgatattgatgcaaacggtatcgtaaatgtatctgcaaaagatctgggaacaggaaaagaacagcacattacaattacagcaggttccaatatgtccgatgcagatatcgacaaagcagtcaaagaagctgctgaattcgaagcacaggataagaagagaaaagaagcgatcgatacaagaaatgaagcagatgctatggtattccagacagaaaaggcactcaaagaagtgggagacaaactggatgcagcagacaaatcttctgtagaggcagatgtacaggcactcaaagatgtccttgcaaaatctacaccagaggatacatctgatgcacaggttgctgaaatcaaagcagcaaaagataaactgatggaaagtgcacagaaactgtttacaaagatgtatgagcaggctggtgcagcagcaggcgctgcaggcggaccgacaccagaagcaggtccggctccagaaggattccagggggatgacgtagtagacggagattacaaagaagtttaagaaatatgatccgacgggagagagcatggctcctcccgttcggtcgtgagttaatcaggaatgaaaggtagattattatggcggagtcaaaaagagattattacgaggtgcttggcgtaagcaaggatgctgacgatgctgcgatcaaaaaagcgtatcgtgcactggcgaagaagtaccatccggatatgaatccgggcgatgccgaagcggaaaagaaatttaaagaagcatccgaagcctatgcggtactgagtgatgctgaaaaacgtcgtcagtacgaccagttcggtcatgctgcgtttgaaggcggcgcaggcggtgctggcggatttggaggctttgacttcaatggcgcagattttggtgatattttcggcgatattttcggcgatttgtttggcggcggtggaagaagaggcggccgtgcgaacaatggcccaatgaaaggtgccaatatccgcaagagtatccgtattacatttgaagaagcagtatttggatgtaagaaagaactggaagtgatcttaaaggatccatgtacgacatgcggaggtactggtgcaaaacctggtacatccccggagacgtgtccaaaatgtggaggaaaaggtcaggttgtatataccagccagtccttctttggaacggtacagaatgtacagacttgtccgaattgtggcggttccggtaaagtaatcaaagaaaaatgtacctcttgttctggaaccggatatacatccagcaagaaaaaaatcgaagtgacgattccggcgggaattgacaatggacagagtgtacgcatccgggaaaaaggagagccgggcacaaatggaggcccaagaggagatcttctggtagaagtaaatgtgtccagacatccgattttccagcgtcaggatatgcacattttctcgactgtgccgatttcttttgcacaggcggcattgggaggcgatgtgaagatccagacagtggatggagctgtactctacaatgtaaaaccgggaacaaagaccgatgccaaggttcggttaaaaggaaaaggggttccgtctctccggaattctgcagtgcgtggagatcattatgtgacactggtgatccagacaccggaaaaactcagtccggaagcaaaagaagcgctgcgcagatttgatgagctgagtggaaactcactgcaccaaaatgacagtgattcggaaaaaagtgagaaaaaaccgaagaaaaaagggtttatggataaagtaaaagaagcgtttgaaggggaagaataagattctgaaaccaaagcaggcagagacagtctcgttatgaggctgtctctgtttttacaccagcaaatacgatcacagaccgttctccaagtaaaacactctgtccggcaatcggcatggcgtctttttcaaatgtctgatgcagagggtcaccggtattgactgcaattttccagacatatccctttggaagcgggggcggtacgagttgtttggaagtccagtgtgaattgacggcaagaaagacaagatcttcctgctgtgttttttcatcaaaccctgcaaacaggacgcagactgtgtggggatccgcgaaagaacccgacggctcaggagaaagtccgaagctgctcatggagggatatgcactataacttggttccagatccctgcgaatagaagggtgctgtttgcggaatgcgatcatatactgaaaaaaggcaaaaagggtttgattcttcacaagcagactccagtccagccaggaaatctcattgtcttgacagtagggattgttgtttccaaaacgggtatctgcaaattcatcgccggagaggaacatgggggtgccgcggctgcacatcagaattgtacaggcattttgcatcattttcatccgaagacgcaaaacactgggattttcggtgtctccctcttcgccacaattccaactgtaattggcatcacatccatcggtgttattccaaccatttgcttcattgtgtttttgattatagctgtacagatcatacagtgtaaatccatcgtggcaggtgagaaagttgacagaagcatttccgcctcgatattgaggattgtacagatccggggagccgcagatgcgtttccgggcaatttcagacaggccgtcgtcacctttgagaaaccgccggatatcatcccggtaacggccgttccattctgcccagcgtctccaggacggaaaagaacctacctggtagagtccgcctgcatcccatgcttctgcaatcagctttacatttcccagaatcggatcaaaggcaagactctgcagaagcggaggctggctcataggagaaccgtcttcatttcttccgaggatcgaggccagatcaaatcggaaaccgtccacccggtaatccgttacccagtagcgcaggcagtccaggatcagttctcgtacaaccgggtggttgcagttcaaagtatttccacagccgctgaaattgtagtaatatccgtccggggtaagcatatagtaaatgttgttgtcaaaccctttgaacgaaaaacaaggaccaagttcatttccttcggcagtatgattaaatacaacatccaggatgacatcaattccgttggcatgcagtgtacggatcaggtgtttgagttcggttccttcatcattgtcttcttttcgggaggcataactggaattaggagaaaaaaaactgacgggattgtatccccagtaatcgatcagctgattttcatcaatcagcctggcatcccgcatttcatcgaattcaaaaatcggcataagctcaacggcattgattcccagttcttttaagtaaggaattttttcttccagtccccggaatgtgccggggcattctacattggaagagggatcttgtgtaaatccccggacatggagctcgtaaataatcagatcctccatgggaatctgtatgtggcggctgtcgccccagtcaaaattattgtgtgtgacacgggcgcggtatccgtgggacagatgattgacacatccccactgactctgtccggtgactgctctggcataggggtccaggaggatttttccggcatcaaagcgcagaccccgtttttcatcataggggccgtccaaccggtaggcgtattcatatttttcaatatcaaaaccaaacacgatcatagaatagacaaacccgatcttataatgatcaggaaaagggagaatggcaaaaggatcgtcttctcctttgtggaagaacaaaagctcgcaggctgttgcaccgtgagattgtatggtgaaatttacaccgcccggaatcacagttgcgccgaaaaatcggaaaaatccggggcgtacctgaaatccggagattgtctcaaggggcggcagctgctgcccgggaacaagtaccagatcagaggtgtgcagtgacataaaaccagctcctttgcaaaataaattctgtctttattataatataaagcaggaccatgaaaaagagtaaaaatcacgtgatatggtatatttgacatagaaaagtgtgatataattgctgtggctttttgaaaaagaatacagaggggagaaacatatttatggcaaacagtgaaaaagagctttcgattaactggaaacatttctattggagtgtacttgcactggtcattccaatggcacttcagaatctgatcaatgtgggagtaacggctgccgatgtggtgatgcttggacgtgtaggggagacggcgctgtccggctcttcacttgcaggacaggtgcagtatattatgactttgtttttgtttggcctgacttccggggcaacggttttgacagcacagtactggggaaaaagagatctgcggacgatcgagaaaatattaggacttggaatgcgggcggctgtcttggtgacaacgctgtttttcctggcggcgcagatcatgccgcggcagcttttgcagatatttaccagtgagccggcagtggttgaacaaggtgtgaagtatttgcggatcgtaagtttttcttatattttcatggggatcacacagacctatctttatattatgcgaagtgtggagcgtgtggttgtggcaacggcagtgtatttatgttccctgatctgcaacattacgatcaacgccgtattgatcttcggacttttcgggatgcctgccatgggagtgcagggggcggctgtcggaacgctggtttccagaattctggagttgattctggtctgtgtatattccaaggtctggaacaaagatatcaaattcagagctgcgtattttttcagaacagaacatattttgaatatggatttcttaaaatatgcattccccgtcattttaaacgaggtgctttgggggctgggaacagcaacaaacacggcgattctcggacatatgggcagtgcggcagttgcggcaaattctgtggcacaggtagcaagacagctggcaacggtagtggcgtttggtctttccagtgcaaccgcaatctatctgggaaaaacaattggagagaagaaatatgagcatgcaaaagcatatgcaaagcgatttgtgtggcttagtgtgattctgggagtagcaggaggactgctgattcttttgatctcaccggttatggccgcaacgatgacgttgtcggaaaccgcaaagggatatatgcagtttatgttttttgtcatgtcttattttgtgataggacaggcgttcaatacaacaatggttgtaggaactttccgttccggaggagataccagatttggtctgcttcttgatatgtctaccatgtggggatgttcgatcctgtttggtgcattggcagcatttgtgttccactgcagcgttccggtggtgtatatgattctgatgagtgatgagatcattaagattccgatcacctggcacaggtatcggagttataaatggttgaaggatataacaagagaagaattgtagacttgtccattccctgcaaattgtggtacaatagaagcagtctgaaatcctgttttcaagatggagacagatgaatttatagataaagagaggtaatgaaaatggaagaacaatatacaggcgaatgttccgaagaatcctgtgcaggatgttctcattccgggtcctgtgaaagccagaagcagaatgcaggaaacacagcaccatccaaagcgccggcaaacgtaggatcccaggtgaaaaaagtgatcggggtgatcagtggaaaaggtggtgttggaaaatcattggtgacagcatctctggctcgtatgatgatcgagaaagggtatactgccgggattttggatgcagatattacaggtccatccattccgaaaatgtacggagtgcatgagatggcaattggaaatgaaatgggaatgcttccgtgcagcgcaccggatggtacaagaatcatgtcagtcaacctgcttttggaagaagaagatacaccggtgatctggagaggacctgtgatctcaggtgttgtgacacagttctggtcagatgtgatgtggggcgatctggattatctgtttgtagatatgcctcctggaacaggagatgttccattgacagtattccagtctcttcctgtagatggtgttgtgatcgttacatcaccacaggatctggtgcagctgattgttaagaaagcatacaatatggcaaaacagatgaacattccagtgcttgggattgtggaaaactacagttatgtaaaatgtccggactgtggaaaagaaatcaaagtgtttggagagagccatattgatgaaattgcagaagagctgggagtaccagtgcttggcaagatgccgatcgatacggccattgcagaggcagtagaggcagaaaaattctatgaggcgaccaatccatatttaaaagatatcgaactgtaaaaacagaaaaaggaagaaggcatcgtacagatggatgtgcgatgccttctttttattcttgggaatagctgctgggcggatatccaaactctcgcttaaatgcccggaaaaaattagaatagtcgttgaatccgcacaaaaaacaggcattcatgacagaagcgccgtttcgcagcatatcacgggcaagaagcagtctttttttcataatgtactgatacaaagacaaaccggtaaattctttgaattttctgctgagataatatttactgatataaaattcattggcaagaaagtccagagacagatcttccgtcagattatcgttgataaatgcgatgagctggttgatcttcgggtttggagtgatgtcatctttgatcgaatctaaagcatcataataagcccgattgacgtacaccagaaactccattaaatatgcgcaaatgagggcagtattgccgattttggcatttcctccggctttggaaatccgggtacaaagttgttttaaatgtatgatatttttgttgtccagacgcatcagccgataatctttagaaatggcatctgtaaaacaagaagtaaaatcttcttggaaaaaagtctgcatatattggaaaaacatatctgtcagataaatctcgatgcgttcgtaaggtttacaggaagaaagatcagcatgatgggtatctgatttgctgatcaaaagtaaatctcccgggcggagtttataatgccggtcttcgatcgtataattgacgtctccggacaaaaagaaaatcatttcataataaaaacaaaaccgggaattaatagtgttgggcgattcatcatataaatggtaaaattcaaagaactggtcggttatcgtcggattgggagggtcaaatttgggattcatcagtacacgccacctttcctctgggcaaataagcaagtgtcaatatggattccttgcaggaaataaaatataaatttattataggacaagaaatgcaatatttcaagcattaaccaccatgtctaaaatggtgattcttgctatactggattcataaagtgagaaaaaatcaatgggatcaaaggagggaacagcatatgaaaaaagggcaaaaagtgattgccgcaatggtatgtgtgagtctgttgccggcagcgctttccggctgtactgcaaaagggggcgagcatcgtcggatcatcagagtcgggcataatcaggcgacagatcatccgactaatcttgcattgatggagtttgaggagtatattgagggcgaactgggtgacaagtatgatgtagaagtgtatccaagtgagttgctggggtcacagacagatatggtgcagctgacgcagacaggcgccatagatttttgtgtggccagcaattccattttggaaacattttcggaaaactatacgttatttaatatgccctacttatttgcctcggctgaagcatatcatgccgcaatggatgacccggaagtggtcggccctatttttgagtcaacaacacaggccggattcgaagcggtgacatggatcgatgcgggtacacgtaatttttatacggtctcgactccaatcgagacaccggcagatttaaaagggctgaaaatccgtgtacagcagtctccaacgaatgtacagatgatgaatctgctgggcgggtctgcgactccgatggggtttggggatgtgtatacagcactgcagtccaaggtgattgatggtgcggagaataatgagatggcgcttacttccaatggacatggagatgtatgtaaatactattcttatgacatgcaccagatgattccggatattttgatcggaaactgtgcgtttcttgcagaactcacagaggaagaacgggagatatttgaagaaggatttgagattgtaaatcgtgtggagcgggaagaatgggtaaaagcagtggaagccgcaaaagaaaaagcagagaaagaacaaggcgtcacatttctatatccggatacaaagcttttccaggaaatatgcgaacccatgcatgaaagcatgttaaaatcctatccggatctgcagtccatttatgacagaatccaggaatataatagaaagtatccggcgtcagcagagtaggaggtggggatcgatgaataaaattcgaaaaggaattacgggaatattgaacggattggcaggacttagttttgctgcaatggtacttctgacttgttggcaggtatttacaagatatgttttgaaaaatccatcgacatggtcagaagagctggttggctatttgtttgcatggatgagtcttctgggtgcctctcttgtaacccaggaaagagggcatatgaacattccgatcctggtagagcggtttggaaaaaccggccagaaagtattgaattgtctgggagaaatcattgcattcttattttctgcggtgattcttgtatttggaggagttcagatcacaacactggcaatgggacagatgacatcgtctcttggtgtgcccattggaatcttttacatcgtactgccgctttgtggtgtacttaatatgatctatacagtgtttaatatcgttgatatatgcaaagaaaaatcaggagaaaaggaggcggtgtaaatggcaattgagtctttgttgatcatcctgggagttttgttggtgttacttgcactgggagttccaatcgcatattcgattggtatttctgcgctggtcgctattttgcagaccgtgccgcttgacgtgtcggttgtcacggcagcacagagaacgtttgtgggaatgagtaaattcagtctgaccgcgataccattctttattctggcaggaaacctgatgaatcagggaggcatcgcaaaaagactggtggattttgtaatggcgctccttggaaaactgcctggagcacttcttgtgacgaatgcaggtgcgaatgcgctgtttggagcaatttcaggctcagcttctgctgcagccgctgcggtaggaagtatggtgaaagaaggggaagaagaactggggtatgatccggctttgtgcgctgcaactaatggagcgtccgcaccttccgggttgttgatcccgccgtctaatgcgttgatcacgtattcccttgcatctggaggaacctcggtggcagcgctgtttcttggcggatacattccgggaatactctgggcgttgtgctgtatcgtggtaggagtatttctcgcaaaacgaaaagggtatcagggagtaaagggcaaatatgactggaagaatcttggaaaagcaacgattcgtgcactgccggccctgtctctgatcgtaatcgtgatcggaggaattgtaatcggagtttttacagcaaccgaaggctcagcaatcgcagttgtatatgcattgatccttgggatttgttatcggaacattacaatgaaatcattgtggaagatcattgtagatagtgcaaaaatgagtggaatggtcgtatttttaatcggcgtatccaatattcttggatgggttatggcgtttttgcagattccacaggctgtttctgcagcattattgggagttacagataattatatattgatcttactgatcatgaatgtgatcttgctgattgcaggaacatttatggatgtaactccggcaattttgatttttactccattatttttgccaatcgtacagacttttggtatgcacccggtgcattttggtctgattttggtttataatctgtgtattggcaacattacaccaccggtgggcaatacattgtttgtatccattaaagtgggaaatacaacactggctaagacaatgccgtatatgctctggtattattttgcaattttgatcggactgcttttggttacttatgtcccgtttttaagcacaggacttccaatcgccgcagggctgatataagaagacaatcatcctgaaaaatatgtataaaaagaccgtccctttgcaattcctctgcaaagggacggtctttttactggaagtgatggggagattataactggatattcttaaacagatccccgagacttgtgccgatttcttcggcttttggaatctctaccttttcgatcacttcttcttccggttcttccagagctttcatgctcagactgatcttgccatctttgatgccgatgaccttgacctgaacttcatcgcctacatttaaaaccgcagcagggctcttgacacgcttctgagaaatctgggaaacatgtaccagaccggacagtccgttctccagtttgataaatgcaccgtaattctgcagagtctctacagtaccggacatgacagaaccaaccgggatatttgcaatctgttcttctttttctctgcgctctttttctttcagaagctcacgggcagacaacacaaggcggtttcctgcctgatcgacatcgatgacctgtacttctacgtctttgagcagatatgcttccagatcttcaatataagaaagagaaagtttggatgccggaataaatccgcgcagaccttctaccatggcaatggcaccgccattgacgattccttcaatttttataggaagtacggttttcttttccatgtactccaggactcgattccacggattggcatcgtcaaaatgctcttcgtaatcagccatcgtttctgtgtgttcttcatgtgtctgtaattcttctgttttcaattcttcgctcatcgctgtacctcgactttctaaaacttcaaaacaaaaatgttattaaaacggaagtttttgtttcacattaaaaacagtataccatatgttttatgaaaataacatggaatcttgaaaattgggttgacgaaatctggaaaaaatggcaagctacatatagagaaaatagcaaaggaagtttggtttatatgaataacggagtgagcaataacaaagtatatgtcgtaggacataaaaatccggatacggattccatttgttctgcgattgcctatgccaatttaaagtcaaagatcacaggggaggattacagcccaaggagggcagggcagctcaatgaagagacgcagtatgtattggatcattttcatgtggaagcccccaaactgttgtctgatctgagagttcaggtgaaagatgtggagctgcgtcacatagaggggatcaagggaagcgtgtccattaaaagtgcgtggaaagcgatgaaggagctgaagatcaagacacttcctgttacaagagatacaaaactggaaggtttgattacaatcggagatattgcaacttcttatatggatgtgtatgacagtgcaattctctcaagagcgagaacccagtaccggaatatcgcatctacgatcgacggcacgatcattgtgggaaacccgcatagttatgtgttaaatggaaaggttggaatccttgcatccagccggagtctgatgtcagaatttgtggaagagaatgatctggtcattttaggagatcggaaagaagcgcagcagcatgcgattgatctgaatgtgagctgtatggtggtctgcaatggagcacatataggagatgagatcttaaaacaggcagaagaaaaagagattgtgatcatttcttctcctcatgatgcatttacagtagcgcgtctgatcaatcagagtattccggtgaagcagtttatgaccaaagaaggaattgtttctttccatatggatgactacgtggatgatgtcaaggatgtgatggcgcgcaggcggtttcgtgatttcccgattctggatgaggcgggaaatttccttggatttatttccaggcgaagattgttgaacagccgcagaaagcaggtgatcctggtggatcacaatgaaaagaatcaggcagtggatggagtggaagaggcagaggtgctggaaatcatcgatcaccatcgcctgagcagcattgagacaatggggcctgtatttttccgcaatcagccggtaggatgtacggcaacgattgtctaccagatgtatcaggaagaggggatagaagtagaaccggtgatcgcttccttactttgctctgcgatcatttccgatacgttgatgtttcgttcaccgacgtgtacacctttggatgaaaaatctgcaagaaaactggcggaaattgcagaaattgatattgagaagctggcattggagatgtttaatgcgggaagcaatctgaaaggaaagacagcggaagaaatctgtttccttgattttaagcagtttacagtcaacgacattaattttggagtaggacagatcagttctatgagtgcagaagaacttcgggagatcaagacggaagtatctgcttatctggagcaggcgaaaaaaacacaggggctggacatgatcttctttatgctgaccaatattatcgcagaatcttccgaattgttgtgtgcgggaaacggagcaagagaaaagatgatctctgcgtttgatctgaaaggcaatccggagacgatcgagttaaaaggagtggtatccagaaagaaacagcttgtgccgactcttgtttcggcgctgcagcagtagaaggagtatagaatgggaaaacaagtatggaaagcaggaaatatggtatatccacttccggcagtgatggtaagcacagcggacagatccggaaacagcaatatcctcacgatcgcatggacaggcacgatctgtacaaatccggcgatggtgtatatttcggtccgcccggaacgctattcatatcatatgctaaaagaaagcggggaatttgtgatcaatctgaccacagaacagcttgcaaaagcaacggattattgtggagtgcggtccggaaaagatgtagataaatggaaagaggcacatcttacccctgcaaaggcagaaaaactgcagtttgcaccagtaattgaagaatgtccggtcaacatcgagtgtaaagttacagaaatcaaagagttgggaagccatcatatgtttttggcagaagttctggcagttcagattgatgaaaagtacttaaatgagaagaataagtttgagttgaataagactggattgatggcatactctcacggagagtatctttctcttgggaagaaaatcggaacatttggatacagtgtaaaaaagaaaaagccgcagcataagaaaaaaaagaaacagaaatagcaagaacactcctggtatctcaaagagagcgggagtgttcttttaatttcaaaatatcggatgcttataatgtgtcgataaatctttcaaatgcggcaagaccttcttctgtgcatttgtaaacgccggcatcttccagaacctggcagaatacttttccaacctcctgctccagaatgtgagaaatatttccagcatggatatccggataagacggcagaaaacgttctgcccaatctgcatgctttgcaatggtctcattgctgcggagctcttttttctccagaatataagtctgcaaaagctccagctcatctttgagacgtgcaggaagtacagcaagtcccattacctcgatcagaccgatattttcttttttgatatgatgcagctcttcatgaggatggtatactccaagcgggtgttcttctgttgtaatgttatttctcagagtcagatccagttcatattttccatcacgcattcttgcaatcggtgtgatcgtgttgtgtggctgtccgtctgtctctgcgaaaacgaaagcggcctcatcggtgtatcctctccatgtttgcaggatatgatctgccaggtcgatgacccgagtcacatcctcagactgcaggcggatcacagagagcggccattttacaataccggctgagacatcttcaaatcctttgacggtaaatgtatggatgacaggagccttttccatggcaaaagtataatgcccgccctggaaatggtcatgacttaggatggatccgcctacgatcggaagatccgcattggatccaagaaaatagtgcgggaactgtttgataaaatcaaacagttttacaaaggtctgacgttcgatcttcattggagtatgttcgccgttaaacacgatacagtgttcgttgtagtacacatatggggaatactggaagccccattggctgttgttgactgtgatcgggatgatgcggtgattctctctggccggatgatcgagtcgtccggcatatccttcattttccatacaaagctgacattttgggtaaacagaaacagaagcattgcgtgcagcggcaatggcttttggatctttttccggtttggacagattgatggtgatatccagtgttccatattctgtctctacggtccatcggcggtcttttttgattcgataacgacgaatgtagtcgctgtcctgactgaatttatagtagtactgtgtggccgcttttggggaattctggtattgtttccagaactcctgctgtacctgggcaggccgtggaagcaggcagttcatcagtcgggtatcgaataaatcccgatatccgatgctgtcttcaatgatgccgcgtgcagcagcttcctgcaaaagatctgagagaatgtcttccagaacaaggtctgtcaggtcgcaggaaacatcttcccagttgtcttcatgaaatacatccaaaagtaaatttgttgtataagtgcgttcgcattccggtgtcagtccggtatcgatcccgtactgcaccagttttttgatagattcgtataacatggataaagtccttctttcttagagagtctccagtttccgggcaccgcttccgatgtccacagtgtagaattctgcttcgtgtcctactttttcctgatatgcaggtccgatggtattgataaaagtgtctacggcatcatttttcacgatgctgaccgtacagcctccgaatccgccgcctgtaatacgggaacctacaacacccggaatctgccatgcaagatctgtgagaatatcgatctcttcgcaggaaactgcataatcgtctctcaaagagatatgagattgattcatcagctcgccaaagcggtcgatattgcctgtctttaatgcagcaaccgcttcgatcgtcctctggttttcatatacggcatgttttgcacgtttttgttccacaggatctgtgatcacttctttgaatttttcgaatgtatcgatgtccaaatctcccagagcatggatgtccagttcttcctgaaggagagacagtgcgtggctgcattcctgacgtctctggttatactgagagtcgacaaggctgtgctttactttactgtttgtgatgatgatcttggcgtcatcaagtacaaccggtgcatattcataagtaagtgtgcttgtatccagaaagatcgcacagtcctttttccccatggcaactgcaaactgatccatgatcccgcaattgcatccattgaagttgttctcggagtactgaccgatcaaggcgatgtccgtcatgctcaatgcatcaaatccacacagatcttttgcaatcactccggtgagaacttctaaagaagcagaagaggacagtccggagccgttcgggatatttccgtagatgaccagatccattccatagtctgcagggtatcctttttcttttaatgcccagaggactccaagcggatagttggcccagttgtattccggtctgttggtcagatcatccagagaggctgtcactacaccgagatgatccagattcatagaatataaccgcaaagtacggtcagcacgtttttttgcaatgccgtatgtaccgatcgtcaatgcgcatggaaatacgtgacctccgttgtagtctgtgtgttctccgatcagattcacgcgtcccggagaaaaataaaaaccagcaccctctgtactgccgaaaagttcttcaaattttttcatcaaaacttctttcatgatatggattcctttctatcagaatttgagtcattttacaatttcattatagaaatccagacaagaaaagtctataaaaaatacgtgcatatatatggaattatgttgtataatgaaaagaaaaatcatatggtaaggaaggctgaggagtatggaacagacgtacaaatattcctataaagtaggggataatcttttgagttctctttcagtatataatgtgggatatcagaagtgcggaccggagcagcagtggggaccgggaatccgggatcactactgtatccaccatatcatttcgggtaagggaacgtatgtggcggagaaaaaagtatatcatttaggagaaggagacagttttatcctgtatcctgatacggaggtaaagtattatgcagatcccggggaaccatgggaatatgcatgggccggatttatggggactgatgcggcagtgatggtgcgggctacggactttacaagaaagaagccggtgatcggacgggacaagattccaggagatctgatccaaagacagttagagcagatctatcaggtaagaggaacgacttacgaagcggcggcagccatgacaggagctctttataccatgttgtcggtgtttatccattatgggacaaaagaagaaaaaaaggacgatctccggcagatttatgtggaacgggcaaaggactacatcgcatccagctattcttacccgattacggtagaggatgttgcggattacacagggatcagcaggagctatctgttccgcgcatttcagaggtatcagaagcagtcccccaaagagtatctgacagaatttcgaatccgtcaggcatgtcatcttttgcgggagacaggactctccatcgcatccattgcatattccgtaggatttgaggataatttgtatttttcgaaggcgttcaaaaagaagatgcagatgagcccttctcaatatcggaaacatcatatgccataaatttgaaaaagacggcatatactgacaatgacgaggaagaggggcgtgaatggattgcgttggaaatggatggggagagtactgactgtcacctatgtttttttgttgctgggaattcagccgtttgcagatattttttcagagagagatctgaaacctgtaagtgcggatgcggagcagacagaagaaatccgtcccaggattgcactgacatttgatgatgggccaagtgcagcatatacaggaaaacttctggagggattaagagagagaggagtgcaggccactttttttctgatcggagaaaatatagaaaaagaggacaatgcgctgttagtccgtcagatggcaagagagggacatctgatcggcaatcatacgtatcaccatgtccagcttacgaagatcaaagaagaggaagcaatcagggaactggaaaaaacgaaccagctgattgaaaagattacaggaaatccggtagaatatgtaaggcctccgtatggagaatttccggggaaactttctgaaaaaatctccatgatcccggttatgtggaccgtggatcccctggactggtctgtgaaagatacggagaaaattgtcagtaaagtagtgacgcagacaaaagaaaatgatatgattttgttgcatgactgttatgagacatcggtggaggcagctctgcagatcatagacagacttcaggaaaaaggatttgaatttgtaacggcagacagattacttctgccttaaaaatagaggagagaaatacaagatgaatgaatattccagaacagaacttttaatcggagaagaggggatgaaaaagctgaagcaggcagcagtcatggtgtttggtgtgggcggcgttggatctcactgtatcgaagcacttgccagaagcggtgtcgggaagctgatcctgatcgacaatgacaaggtttccctgacgaatatcaaccgacagtcgatcgcatatcacagcaccattggacggatgaagaccgaggtgatgcgggaacggatccgggacatcaatccggagattgttgtaaagacttatgagatgtttgtgctgccggataacgtggaggaattgtttgaagaagctccggattatatcattgatgcgattgatacggtgacggcaaaattggcgatcgtggagctggcacaaaagagggggatccctctgatcagcagcatgggaaccggcaacaaactgcatccggagctttttgagattacggacttgtcaaaaaccacgatgtgtccgctttgcaaagtgatgcgaagagaactcaaagcaagagggatccggcatctgaaagtgctgtattcaccggaaaagtcaatcgatacatccggggctgagaccggggaggacaaagggatgcgccgtgcacttccgggaagtatctcctttgtgccgccggttgcagggcttttgatcgcaggagaagtgatccgcgagatcagtgaagtttaaaatacaaaagttgacaggaggaaaatcatggatttgtttgattatatgagggaaaagacacaggaacaggagtcccctctggcatccaggatgcgtccgcagacgctggaggaagttgtggggcagcagcatattatcggaaaagacaagctgctgtaccgtgctattaaggcggataagctaggatcgatcattttttacggacctccgggaacaggaaaaacgacactggcaaaagtgatcgcacacacgaccagtgcagagtttcagcagatcaatgccacagtagcgggcaaaaaggatatggagcaggtcgtaaatgatgcaaaagagctgttggggatgtaccgcaaaaagacaattctgttcattgatgagattcacagattcaacaaagggcagcaggactatctgcttccgtttgttgaagacggtacgattacactgatcggggcgactacggaaaatccgtattttgaagtcaacggggcgctgctttccagatccagtgtatttgaactaaagcctctggaaaaggaagatatccgtacacttttaaaacgggctgtgtacgatgaaaaaaagggaatgggaagttttcatgcagagattgaagaggacgcgctggaatttttggcagatgtatcagggggagatgccagaagtgcgttgaatgcgattgaactgggaattttgacaactcagagaagtgcggatggaaaaatccatattacgctggatgtggcgtctgaatgcatacagaagcgcgccgtacgttatgataaaggcggggataaccattatgatacaatttctgcatttattaagagtatgcgtggttccgatccggatgctgcggtttattatctggcaaaaatgctgtatgcaggagaagacatcaaatttattgcccgaaggattatgatctgtgcggcggaagatgtggggaatgcagatcccatggcacttacggtggcggtgtctgcagcccaggcggtagaacgcatcggtatgccggaggcacagattattttatcgcaggcggtactttatgtggcgacagcgccaaaaagtaattctgcagtcaatgcgatctttgcagccagtgaaaatgtgcgtcagtataagacgactgtcccgtctcatttgcaggatgcccactacaagggatcaaagaaccttggacatggtataggatacaaatatgcacatgattatccggggcactatgtggagcagcagtatcttccggatgaaatcaaaaacgccaggttctatgaacccggcgatcttggttatgaaaaacagatcaaagaacatttacaaaagcttcgcaagcagtagggcataaatgtcctggctttgagaagaccagtttccggcaatggcttcggcttctgattcggtgggaaccgtgagtttcagatcgatcaggctgaagccgttttctacaatctggcagcagacctcatactcgtggtttgtgttcagatagtagtcggatttgatggaaacttcttctttcagatcatatttcttttctctgagaaattcgtcaatatccttttggatggcaggagaaatcttgtttttaaaatattgaatggtatccagaccgttgtctgttaaatggtaaagtgttcgattatgtgtagtttccacacgtaaaagtccggaatgttccatctcagcaagagtctcctgaagtttaaaataagtcgtgtattctttttccagaataaattcggaaatctgtgaagttgtcaatggaaaatccactttatccagcatgtacaatacgatcagtttatacagtgtataagtttcagacatgatactcctttccctgccagatatcctgttctttcaggtggctgtgaagctggtttaatacggttcttttttggctcgtccaaagtggcgcgatcaaaaggtctttgggtccatctccggttaggcggtggatgacgatttcggggttcaactgtgcgatgcaggtgccgagaagctgaatatagtcttgcatatcaggtatataaaaagcgtgtttttcatagtctgctgcaaggtcagtgtgcttcagaacgtgcaaaagctgcagcttgattccctggatatccatatgattgagataatggatcgtatccagcatctcttttttggtttcacccggcagatataaaattgtatggacgattacggtaatgccgatggcacgcagttcttttacggcctgttcaaataccgggagatcgtatcctcttcggatataagcgctggttgccggatggatcgtctgcagtcccagttcgatccagaccggtttgatctgattgatttctgcaagcagtgcgaggacctctgctcccagacaatccggtctggtagcgatggagagaatcttgacttccggatctgaaatcgcttccatatagagggcacgaagtgtttctgtcggggcgtacgtatttgtgaatgcctgaaaataggcgatataggagtgtaccgggcgtttggaggaaatatcggcttttccctgtcggatctgttctgtgatagaaagtctggcagagccggcgaaatctccggatccctgggcgctgcagaagatacagccgccttttcctacatgcccgtcccggtttggacaggtcataccgccgtttagagcgattttgtaaactttttctccgaacatctgttttaattcatagttcagagaatggtatcttttttcaccccagcgcatgatcagatcagttcctttacagctttgctgacgacatctgccacgcgggaatcgaatgcttccggaaggatattgttttcattcaattcttcatcggaaacaagaccggcaatggcgttggctgtggcgagtttcatctcttctgtgatctgggaagcacgaccctccagagcacctttgaaaattcccgggaaagcgacaacattattgacctgattcgggaaatcagagcgtccggtcccaacaacgcgtgctcctgcttcttttgcaaggtccggcatgatctccggaacagggttagccatggcaaaaagaatggcatccgaattcatagaggcgaccatctcttttgtgacaatgccaggggcagaaacgccgacgaaaatgtcagctccacacatggcgtcagcaagagaccctgttttgtgttccagatttgttacttctgtcatttttttctgcatccagttcaggtttggagatgcactgctgatgattccgttgatatcgcacatcgtaatatgttcaaaaccataggtcaggagcagttttgtaatcgcaattccagcggaaccggcaccgtttacaacaaccctgcagtcttcttttttctttccggttaccttcagggcattgatgataccggcaagaacaacgatggcagttccgtgctggtcatcgtggaagaccggaatatccaacaactcttttaagcgctcttcaatttcaaaacagcgcggagcagagatgtcttccagattgatgcctccaaatgctggtgcaatgttcacgaccgttttgatgatttcttccgtatcctgtgtgtccaggcagatcggaacagcattgacaccgccgaattccttgaagagaacagcttttccctccatgacgggcatagctgcaagggctccgatatttccaaggccgagaacggcactcccgtcagaaactacggccacggtattggatttgatggtatatttgtaagcggcttccggatctttggcaatgaccttacaaggttcggctacacccggtgtgtaagcaattgccagatcttctctggaattgacatgagcttttgctgcagtttccagttttccattccattcttcgtgcatctgtaatgctttttcgctgtttgtcatagtttttacctcgctgatttttagatttcctgtgcagaacacattcttccataatcataacactgttgtggaaagggtgcaagattgcaaaaaaaactttctttttcgggaaagatgagatataatggaaaaacaaactttacaaattattcaaattaagtcagttcagacaaagatccccaagagacggaatgtaaaatgaatagatcaaaaagtaaattttgagaaaggcaggtcgttatgacaagagaaaaatatgaatcgttaccgcttgctactttgcgggaattggcaaaggcaagaaagatgaaaggaatttcgacattaaaaaaaggtgagctgatcgaagcaatgctggctcaggatgataaagaaaaacaagaagaagccaatgcacaggcgaaagaagaagtaaaagaaaaaaaagaaggtacggatattgaacagcttgacagtgggcgcactgcgaatgggattctggaagtgcttccggatggatatggatttatccggtgcgagaattatcttccgggtgagaatgatgtgtatgtgtctccgtcccagattcgccgttttaatctgaaaacaggagatatcattaccggaaatacgagaattaaaacacagtctgagaaattcagtgcacttttgtatgtttccaccatcaatggcctgcgcccggcggaggcagtaaagcgacacaattttgaagaattgacgccgatttttccaaatgagaggatttcgttggaaacgccgggagcgacaactgcaatgcggattgtagatctgctgtcgccgatcggaaaaggacaaagaggaatgatcgtatctccaccgaaagccggtaaaacaactttattgaaagaagtagcgctttctgttcaaaaaagagagccgaatatgcatcttttgattcttctgatcgatgagcgtccagaagaggtgacagacatcagagaggcaatcgcaggaccaaatgtggaagtgatctactccacatttgatgagctgccggatcatcacaaaagggtatccgagatggtgatcgagcgtgcaaagcgtctggtagagcatggaaaagatgttatgatcttattggacagtattacccgtctggcaagagcatacaatctgacagtgccgccgtcaggaagaacgctttccggtggtctggatccggctgcactgcatatgccaaaaagaattttcggtgctgcaagaaatatgcgtgaaggcggaagtctgacaattctggcaacagcgcttgtagacacaggaagcaagatggatgatgtcatttatgaagaatttaagggaaccggtaatatggagctggtactggatcgaaaacttcaggagaagagagtgttcccagcgatcgatattccaaaatccggaacaagaagggaagatctgctgttaaataaggaagagcaagaagccgtctatattatccgaaaagcgctcaatggtatgaaagcagatgaatctgtggataatcttttgaatatgttttcacgcacaagaaccaatgcggaactggtacagactgtaattcgtcaaaaatttatctaaaatcggctttgtacgaaagaaaatacttgattctccccctcaaaacagatatgatattctggttggtgtcctgcaagaacagcgaaaatgcgggatattcctgaatatttgaatgatgagaagctgaggaggaaatcaagatgtttcgtgaagaaattgacatggcaggaaatgcagccaaaacgaaaatccagtttctgcgacagaaaaaggcggggttttttatatcagccatgctggcgggaatgtttgtcggatttggagtgcttctggcatttacagccggtgggatgttaaaagaaggcggcgtaccaggtgtaaagtttattatgggagcatgttttggtgttgccctgagtctggtccttatggcaggtgcagagctttttacgggaagcaacttcgtaatggcagtaggtatatttcagaaaaaagttaccattttggatgcaataaccgtatgggcagtctgctggcttgggaatttaacaggatctgttttgctggccggaatgtatacattgacagggctttgtacaggaagtgtggaagagcttctggcagagacaacactggcaaagatgacagtggcaccgggagaattatttatgcgggctgtgctttgtaatatcctggtgtgtcttgcggtgtggtgtggaatgaaaatgaaatcagaatctggaaaactgatcatggtattctggtgtctgattacattttttacggcaggttttgagcatagcgtggccaatatgtctacaatgatgatcgggttgatgaatccggcgcagctggatctcggtattggcggatacgtttataatctggtcatcgcaaccattggaaatatggcaggaggcattctgttcacggctgttccatattttctgattgcaaaagaaaaggagtcagaaaacgaaaaaaaataaaaaagtaaaaaaagataaagttttcttactgaaaaaacttgcaaaacagaaaaaattatgctattatggggtagctgtttagagattagaataatattttaaaatagagaggtgaaaatcatgagagaaggaatccatccagagtaccatcaggcaacagtaacttgtaactgtggaaacacatttgtaacaggatctacaaacgagagcatccacgtagaaatctgctccaaatgccatccattctatacaggtcagcagaaagctgctcaggctcgcggacgtgttgacaagttcaacaaaaaatatggtattaaataagaaaagactatggcaggctgaggtgaatgtatctcagcctgtttttcgtatatagaaaaacaggaggacaatatgaagtcatcaaacataggcggacaggcagtattagaaggcattatgatgaaaaataaaacgcgctatgcagttgctgtcagaaagccgaatcaggagatcgaggtttgtgtcaaagaatacaaagggatcattccctggcagggggtgtataaaatcccctttatccgtgggatttttagttttatcgattcactcgtattgggaatgaaaacactgacctattctgcgagtttttttgaagaagaggacgaagtactgactgaacaggaggcacaaaagcaggaaaaacaggaaaaaattgtgatgggagtgacaatggttgtatccgttgtggctgcggttgggatttttatggttttgccttaccttttgagtaatctgttgaagcattatatttcgtccagaggaatccttacagcactggaaggtgtgattcgaatggggatctttcttttgtatattggactgatttccaaaatgaaagatattcagcgaacatttatgtatcacggagcagaacataaatgtatcaactgcattgaacacgggatgccccttaccgttgaaaatgtaaggaaaagttccaggcagcataagcgctgcggaacaagttttctcttttttgtaatgatcgtcagcattattttctgtttttttatcactgcagaatcacaggctttgaaagtggggctcagaattgctttgatgccggttattgccggagtttcttatgagatgatccgattggcgggaaacagtgaaaatccggttgtcaatctgttgagcaagccgggaatgtgggtgcagatgatgacaacaaaagaacccgatgacagtatgatcgaagtggcaattcgggcagtagaagaagtgtttgactggaaagcctatctgaaagacaatgtttctgcagcaggtaattttacggagaaacaagggtgcacacaggagggatgtgctttatgacatggaaagaagcgtggcagatgggggcgcagactctggaaaaagccggcgtggaagaatatcagctggatgcctggtatttattagaatacgtgaccggaatcacaaagacttcctattatatggagcccgagcatccgatgcatgaacaggaggaacgtgagtatctggagttgatccaaaaaagaagtacacggattccactgcagcatctgacgggggtacaggagttcatgggattggaatttgcggtgaatgagcatgtgctgattcctcgacaagatacagaagtgctggtggaaacagcgctggaggtctgcagcagggaacagctgcagaagattcgccttttggatatgtgtaccggatccggatgtattttgttgagcattctgcatgaactcagtgcccgtacagcaactggtgttggcgtagatctttcaaaagctgcattggatattgcgaaagaaaatgcaaaaaagctggggatcgacgcggaatttttggaaagtgatctgtttgcaaaggtggaaggaacttatgatatgatcgtatccaatcctccttatatccggacgtctgtgatagagactttgcagaaggaagtcaaagagcatgatccgattctggcattggacggaaaagaagatggattgtacttttacagggagatcatcaaagcagcagctgcatatttgaagacaacaggatggcttttgtttgaaattggttttgatcaggcagaagatgttaaaaaaatgatggaacaggccggatacaccagagtaagtgtgaaaaaggatttggcagggcttgaccgggtggtctttggcgtgtatgataggaaagatgagtaatagaaaggacgaggaaagagatgtttgataaattagaggacttactgatccgctatgaggaagtcatgggagaacttcaggagcccggcgttgcaaatgatccggagcgtttccgaaagctgatgaaagaacaaagtgatcttgctccgatcgtagaagcatataatgagtataaacagtgtaagcagaatatagaggacagcctgatgatgctggaagaagaatctgatgaggagatgcgtgagctggcaaaggaagaactcaatgagtccaaagccagagtggaagagctggaacaggaattgaagattctgctgcttccaaaggatccgaatgatgacaaaaacgtaatcgtggagattcgtgccggtgcaggcggtgacgaagcagcactttttgctgcggaggtataccgtatgtatgtacattatgcagagagccgcagatggagaacggagatgatctctcttaacgaaaatggaatcggcggattcaaagaatgcgtatttatgatcacaggacagggtgcatactcccgtatgaaatatgagagcggtgtgcaccgtgtgcagcgtgtgccggagacagagagtggaggtcgtattcatacatcaaccattacagttgccgtgatgccggaagcagaggatgtagatgttgtgatcgatgaaaaggatatccgtatcgatgttatgagagcatccggaaatggtgggcagtgtgtcaatacgacagactctgcagtacgtctgacacattatccgacaggaattgtaatctatagccagacagaaaaatcacagctgcagaataaggaaaaagcattccgtctgcttcgctctaaattgtatgaactggagctggaaaaacagcagtctgcagaggctgaggcgagaagaagtcagattggaacaggagatcgttcggaaaagatcagaacctataacttcccacagggacgtgtgacagatcacaggatcaagctgacgcttcacaaactggatacgattttaaacggagatctggatgaagtgatcgacagtctgatcgcagcagaccaggctgcaaaattagcaaacatgaatgagtagagtgtaaggcagcggttgtccgctgcttttcattttgcgtttcgaaaaagaatatgctatactaacaaaatatcagcggtatataataggagaatgaaattttagaaagaggatattatggaagaaattatttttagaagacctgctcttgaggatcaggagctgatccgatcttattttggaaaggcgccgagcagaagctgtgacagaacttttgccgatgtttttctctgggcacgtcattatgatgtgacatttgctgtgatagaggatacactggtatttcgggatggaggaaaagagcctggctttgcatatccggcaggagaaaaaacgtgtgttaagaaagcgttagaattcttgatgaagtatagcgaagaacagggatacccgtttaaactgtacaatgtgacacaggagaattttgcacagatcgaagagtggtttccgggagagtttgaactggagtatgacagagatcaggcggattatgtatatgaatccgaaaaattggcgactttggcagggaaaaaactgcatggaaagcgaaatcatatcaataagttccaaaaagagtacccggactggagctatgaaccgttgagtgatgaaaatatggaagagtgttttcagatggcgttaaaatggagaaaccagaatggctgtgaagatgatcctggaaaaaatgcagagatgtgtgttgctttgaatgcactgagattatataaagaattaaatcagcagggcggtgtgctccgggtgaatggacaagttgtggcatttacgattggagaagaactttgtgaggatacgtttgttgtgcacatcgagaaggcttttgcagaaatagagggtgcctacccaatgatcaatcagcaatttgtacagcatgaatgtacagagtatcagtatgtgaaccgggaggatgacgcaggttcagaaggcttgcgaaaagcaaagttatcgtatcgtccggcatttttggttgaaaaaggaatcctgacgaaaaaaagcgcataaatcaataaaagagaaaacggggtggtatcatgatttcgaagaaaatggaacagatggtagcaaacagctcagcaattcgggcaatgtttgaagaaggaaacaaaatggcagagaaatacggtgcagatcatgtgtatgatttcagtctcggcaatcccaatgtgcctgcgcctaaggcagtaaaagaggcaattgtctccattcttgaatccgaagacccaatccgccttcatggatatacgaacagcaatgcaggatatgcagatgtacgaaaggcagttgcagattccctgaatgcacggtttgatacaaagttttccagtcagaatattacaatgacagtgggagcagcgggtggattgaacgtgattctgaaagcacttttaaatccgggtgatgaggtgatcacatttgcaccatattttggcgaatatcgcagttatgtcagtaattttgacggagttctggtggagatatcaccggatacggaaactttccagccccaactccaagaatttgaacaaaagatcacagaaaagacaaaggctgtcatcgtgaacacgccgaacaatccgaccggagttatttattcagaagagacgatcaaaaagatggcagcaatcatgaatgcaaagcaggaagaatttggcacagagatttatctcatttcagatgaaccgtatcgagaacttgcatatgatggggcagaagttccgtacctgacaaaatattatgcaaacacagtggttggatattcattcagcaaatcgctttcacttcccggagagagaatcggatatctggtgattccggatgaagcagcggacagcgaaactctgatccgggcagtgaatgtagcaacgcggattctgggttttgtgaatgcaccgacactgcagcagaagatcgtgaagcattgtttgaatgaaaaaacagatatttcatattacaatagaaatagagaagccttataccagggacttcatgaactggggtttgagtgtattaagccggaaggcgcattctatctgtttatgaaatcccctgttgcggatgaaaagcagttctgtgaagcagcgaagaaatatcatatcctgtttgttccgggaagttcatttgcatgtcccggctatgtcagactggcatattgtgtatcttatgagacaatcataaatgctctgccggaatttgcaaaactggcagcagaatataaggagtgagtagaagtatgaatcaggcgattttagagaaggtccgaagagtggagccttatgtaccgggagaacagccaaaggagcaggtgatcaagctcaatacgaacgagaatccttatccaccggctcctggagtagcaaaagttttaaaagagatggatgcggatacgcttcggttgtatccggatccgacggcagatgttctggtggaagaacttgcagctttttatcgggtcaaaaaggaacaggtttttgtaggtgttggttcagatgatgtgttgtctatgtgttttttgacattttttaattcggataagccaattttgtttccggatattacatattctttttataaagtatgggcacaattgtatcggattccgtatcagtgtccgcggctggatgagcagtttcatctggtaaaagaagattattatgttccaaacggtggaattatctttccaaatccaaatgctccgaccgcaatctatgaagatctggattttgtagaagatattttgcgtcataatccgaattctgttgtgatcgtggatgaggcatatattgactttgcaggaaagtcagcgttagaattgatcgatcgttatgagaatcttctggtcgtacagacattttcaaagtcccgatctatggcgggaatgcgaattggttttgcgattggaaatccagaattgatcggatatctcaacgatgcaaaatattcattcaactcttatacgatcaatcagacttctctgctttgcggggcgcagagcatgagagatgagacatattttcatgcatgtgttgataaaatagtagagacaagagagtggacgaaaaaagaactttcagagcttgggtttatgtttacagattccaaagccaactttttgtttgtgacgcatcctgaatttgatgcggctgaattatttgaggcattaaaacgagaaaaaatttatgtgagatactggaacagtgagaggattcgtcagtatttgagaattacagtgggaaccagagaagaaatggagcatctgctggagtttttgaaggaatatatcaaagaaagaaggaaaggtaaaaaagaatgttaaaacagattttgcagggaatggttgttggaattgccaatatcatcccaggtgtcagtggcggaacgatgatggtggcgatgggattgtatgatcagctgattcatgcaatcacacatttaaaaagtgaatttaagaagagtatgagacttttgatcccgatttttttaggagcagggattgcaattgttgtactgtcccgtctttttgaatacttactggaagtatatccgatcccgacgaattttgcgttttgtggtctgattgcaggaagtcttccctttatttttaaaaaggtaaaaggacattccgtaaccgctgggaagatcattccgtttctgatttttttcggagttgtaattgggatggcatttctgggagagtcaagtggtgcggcagcggatgtaagttttgggattgtcaatgtaatcaaattatttctggtaggtattgtagcagctgcaacaatggtcgtacccggggtgagtggatctatgatgctgatgctgctcggatattatgacacaatcttaaagacgatcaatcagacgatcgacggaatggttgcattggatattcagaaaattctcgtacagtgtggtgtgctgattccattcggaatcggagttgtaatcggaattttcctgatcgcaaaactgattgaatttattttcatgaaagcagagatacatgcctattatgcgatcattggtctgattcttgcatctccgattgcaattttgttaaaagtggactggagcgggatttcagtcctcacgattggcgttggaattgtgactttttgtcttggatggtttacagccagcaaactcggtggagaataaaatacaagtatgcagatataaaaagggaagaatgcgaatttatttttgcattcttccctttttgccttctttgttttgcagaaattctgtgtattcgaaaagttgctgcctggcctcggaagaaagattcagataagcacagagcaggcgatattccgaggagtctggcgggacagagatccctttggtctgtgaaccggtaagcagataatcgacagatacatgaaaaaaatctgcaatttgaagcaaacgctcgtaatccggctgctttccttttgtttcgtatcctgcaatggtagaacgagtcagctttaagtgggaagccagctggttttgggtgatatgattttgttctcttaattcttttaatgtagatgaaaacttcatatttacctcctaaataatgtgtattttaacagtttgcttccgtttattgccaaaaagtgacaaatatcaacaaaatgaataaaaaagtgacaaaaagacacgacgccgagggggagggaaacgcattgacacctacatagaaaattcgtataatgaaacagaagaaaagaaaggatgacaggaagtatgtttgcaaaaaatgatgaagaaaaaaggaatcgtctttggaagactgccatatcagtatctacactggtaattattctggttgcagtgttctttgtgataaaattatttacctccaaccctttggaaggaagttgggtgcgggaagacagtgatcttgtactgacgatccaggatgaagaccgggcgattgttcagtggccggaagaaatggaatccccggatgtgacagtttctctcgattgcagtgtggatacggatatgaaagtaatcacatttcggattgatgcggatgcagtacagaaagcagcggaagaatcaggagcggcggcagaaaaactggagactgcactgcagaagctggaaggaacatatgagtacaatctggtgcagggagaattgacactgacagagcgagaatatggaagccagatgacgtttacaaagaaatagagcatatgatacagacggtggatgcggggattgaaacaatttctcatccgccgtaaatttaacactatttttgggagaacaggaggaaacaggatgaaaatgttgagaaatcagacaaaagaagtacgaattggagatgtgtggatcggaggggatcatccggttgcgattcagtcaatgacaaatacaaagacagaggatgtgtcggctacagtggagcagattttagcactggaggcagcgggatgcgagatcatccgctgtgcggttcctacgatggaagcagcgctggcattaaaggaaataaaaaaacagatccatattccacttgtggcagatattcattttgattaccgtcttgctattgcggcgattgaaaacggggcagataagatccgcatcaatccaggaaacattgggtccagagaacgcgtacaggcagtggtagaaaaagccaaagagtatcaggtaccgattcgtgtaggggtcaacagtggttctctggaaaaaaatctcctggaaaaatatggaggagtgacagcagagggaattgtagagagtgcgatggataaagtgcatatgattgaggagatgggatatgacaatcttgtggtgagcatcaaatcatcggatgtgatgatgtgtgtcaaagctcacgaacagatcgcagaacaatgcagatatcctttacacgtcggaattacagagtccggtacgctgtattccggaaatatcaagtcttcggtaggtcttgggattattttaaatgccgggattggaaatacgatccgggtatcgctgacgggggatccgacagaagaaatccgcacagcaaaattgatcttaaagacactgggtatgcgaaaaggcggaattgaagtagtttcctgtccgacctgcggccggaccagaattgatctgatcggtcttgccaatcaggtagaaaagatggtacaggatattgatctggatatcaaagtggcggtcatgggatgtgtggtcaatggaccgggagaagcaaaagaagcggatatagggattgcaggtggaattggagaaggacttttgatcaaaaagggtgagattgttaaaaaagtaaaagaagaagagctgttggatacgctgcgtcaggagttgttaaattggaacaaataaaaaataaaaagacattttttgaagtatttccaactctgaaaacagacggagaattaaagatgctgttccaggatgtggaagtgaaaaaaatcacgaccaattccacacgggagtttctgcacattcacatggtcagtcatcatctgattcctaagaagctgatctggaagatggaacagagtatcaaagagcagttgtttggtacggtgtcagttaggatccgtctggaagagcattatgtactgtcggagctgtatacactggaaactttgcttacggaatataaagaaagtctggtgttagagctggaaaagcagagtgtactggcagccagtatgtttgagcaggccaggcttcattttgaaggggagaaaactgtatgcgtggaacttctggataccattgtgtcagagggaaagaaggagtatatcgtagaacttttgaaagacgtgctgggcagccgttttggaatgcaggcagagatccgggtgctctatcgggaacaggaagaacatcagaaccgggaatacgatgagcagcggatccagcaggagatcaatgctatttttgagcgaagagcaaggcaaaaaggagaagttccacaaaagcaggcgacagaaaacaatccagaatcgacaaaagaaaagaaaacggcagataccggaaggaaagagagtacaaaatctggatttaaaaagggtgagattcgaaagaaagagttccagcgtcctctcaagcagggagatgatccggctcttatttatggtaagaattttgaagaggaaccgctgactctggatcaggttattacggagatgggagagatcaccattcatggtaagatcattagttttgatacaagagaaatccgcaatgagaagaccattttgatgttttctgtgacagattttaccgatacgatcacggtcaagatgtttgtaagaaatgatcagctgacagagcttttgggagacatcaaaaagggtgcttttgtcaagatcaaaggagtgacaaccattgacaaatttgatggggaactgacgataggatcggtgacaggaattaagaaaatcggagattttacggtttccagagaagatctgagcccggtgaaaagagtggaactgcactgtcataccaaaatgagtgatatggatggagtgtcagaagttaagaatattgtaaaaagggcccatgattggggacatccggcgattgcaatcacggatcacggagttgctcagtcatttccagatgccaatcactatattgagacattggataaggatgatccgtttaaagtaatctacggtgttgagggatatgtggtcgatgacctgacagagatcgcggtcaatgccaaagaacagacgctggatgagatatatattgtgtttgatattgagacgacagggttttcagcgatcaaggataagatcatagaaattggagctgtcaaggtaaaagatggtgtcattgtggacaaattcagtacctttgtcaatcccgggcgtccgattccgtttgagatcacacagctgaccagtatcacagatgagatggtgctggatgctccggatattgagactgtgctcccgcagtttttggaatttgttggggatggcgtgctggtggcacacaatgccggctttgatgtgggatttatggaacagaactgcagatatcaggaaatcgaaccggattttgtgtatgtggataccgtggcacttgcaagagtgctgctgccgacattgtcaaaatataaactgaatattgtggcaaaggctctgggaatctccttggagaaccatcatcgtgcagtggatgatgcaggggcaactgcagagatcttcgtgaagtttgtagagatgctcaaagatcagaatattacgacgctcaaagagatgaaccggtttggagacatgaatgtgaatgcaattcgaaaactgccgacatatcatattattattctggtaaaaaatgatatcgggcgattcaatctgtatcagctgatctctgcttctcacctgacgtattttgcgagaaggccgagaatccccaaaagccttttgaaccagcacagggaagggctgattataggaagcgcctgtgaggcgggagagttgtatcaggcaatcttgaatcagaaatctccgcaggcgatcgcgagactggccgagttttatgattattatgagattcagcctgttgggaataatgagtttatgatcgaaagtgatcggtatggggatatcaattcgaaagaggatttgcaaaatatcaaccgtgagattgtcagtcttggtgaaaaattcaaaaagccggtcgtggcgacctgtgatgtgcatttcctggatccggaggatgaagtctaccgaaggattattatggcaggaaaaggatttggagatgcagatacgcagccacctttgtatttgcgtacaacggacgagatgctggacgagttttcttatctcggttctgcaaaagcgagagagattgtcatcgacaatccgaatcgaatctgcgatatggtggagaagatttcgccggtcaatccaaataaatgtccgccggtcattgaaaattccgaacagaatttaagggatatctgttacaacagagcacatgagatctatggagaagagctgccggagccagtgcagacaagattggaacgggaattgacgtccattatttccaatgggtattcggtaatgtatatcattgcacagaaactggtatggaaatccaatgatgacgggtatctggtaggatcccgtggttctgtagggtcttcttttgttgcgaccatggcggggattacggaggtaaatccgctaagtccgcattattactgcagcgaatgtcattacagtgattttgagtccgaggaagtgcgtgccttcgcaggaggatgtggatttgatatgccggataaaaactgtccgaactgcggtgcaaagcttgtgaaagcaggatttgatatcccgtttgagactttccttggattcaaaggagacaaggaaccggatattgacttgaacttctctggagattatcaggcaaaagcacaccggtatacagaagttatttttggggagggacatacattcaaagcgggaaccatcggaacgctggcagataagacagcgtttggatatgtgaaaaactattatgaagagcgaggacaccgcaaacggaaatgtgagatcgatcggatcttacagggatgtacaggaatcaggcgaagtacgggacagcatccgggggggattgtagtactgccgcatggacatgatatcaatgagtttacaccggttcagcatccggcaaatgatatgacgacggatattattacgactcattttgattatcattccattgaccacaaccttttaaaactggatattctgggacatgatgatccgacgatgattcgaacactggaggagtacattacatccgatgcgctggaaaatgaatacaacgaggagaatccgtttgatgcgacaaaaattccattggatgataaaaaagtactttctctgtttcacgataccagtgcgctgggaatcaagccggaggacattgacggctgtaatctgggatgccttggaatcccggaatttggaacagactttgttatccagatggtacaggacgccaacccgcagtcgctttcggatctgattcgtatttccggattgtctcatggaacaaatgtgtggcttggaaatgcacaggttctgattgagtccggcaaggcgactatttccacggcaatctgtacccgggatgatattatgatctatctgatcaaccagggagtggacagtgcactgtcatttacgatcatggagagtgtgcgaaaaggaaaaggactgaagccggaatgggaagaggcaatgaaagaaaaagatgtgccggactggtatatctggtcctgtaagcagatcagctatatgttcccgaaagcgcatgcggcggcatatgttatgatggcgtaccgcattgcgtattgtaaaatcaattatccgctggcatattatggagcatattttggaatccgtgccaatgcattttcttacgagctgatgtgtcagggaaaagaaaaactgaactattatatgaaagattataagcgccgcgcggattctttgagcaacaaagaacaggatgtgctgaaagatatgaagatcgtacaggagatgtacgccaggggatatgaatttcttccacttgatatttacaaggcaaaggcaacaaagttccagattattgacggaaaactaatgcctccgctctccagcatcgagggaatgggagaaaaagcagcagaagcggtggaggaagcgtcaaaagatggtccctatctgtctctggatgatttcaggcagcggacaaaagtcagcaaaacggtgattgaatttatgtcggagttgggattgtttggaaatcttccgcagagtaatcagctttctttgtttgatttttagaaaagatgtggtataataggacaactgttactttgttgcgtcacaaggataaagtgacagggcatcagaagagaatggaggaagatgcaatgtatgattttgaagagataagaaaagaagacccggagattgcggaggcgattcaggaagagatggccagacagaattctcacattgaactgatcgcgtcagaaaactgggtcagcaaagcggtaatggctgcaatgggaagtccgcttaccaataaatatgccgaaggatatccgggcagacggtattatggcgggtgtcagtgtgtggatgtggcagaaaatctggcgattgaacgtgccaaaaaactgtttggctgtgaatatgcaaatgtgcagccgcattccggagcacaggcaaatatggccgttcagtttgcgatcctgactccgggggatcgtgtgatggggatgaatctggatcatggtggtcatcttacccacggatcaccggtgaatatgtcaggaaaatatttcgagattacgccttatggagtcaatgaagaaggcgtgatcgattacgaagaagtgcgtcgaatcgcaaaagagtgccggcccaaactgattattgcaggagcaagtgcctatgcaaggacgatcgatttcaaaaaattcagagagatcgcggacgaagtaggggcatatctgatggtagatatggcgcatattgccggtctggttgcagcaggtctccatccaagtccgattccatatgcgcatgttacaacaacgaccacccataagacactgcgtggtccccgtggaggaatgatcttaagcagtcaggagatgaatgaaaagttcaacttcaataaagccattttcccaggaattcagggaggtccgctgatgcatgtgatcgcagcaaaagcggtgtgtttcaaagaggctctgagtccggaatttgttgcatatcaggaacagattttaaaaaatgcaaaggcattgtgcagtggattgttagagcgaggcgtaaagattgtatccggcggcacggacaatcatctgatgctggtagatctgacaggaacagatgtgagcgggaaagaactggagaaacgtctggatcaggcacatattacctgcaataaaaataccattccgaatgaccctcgttctccgtttgtgacaagcggtgtccgtttgggtacaccggcagttacgagcagagggatgaaagaagaggatatggatcagatcgcagagatgatcgcaatggtgatccaagatgaatcgaatgtagaaacagtcaaagcgatggtacagaagctgacagaaaaatatcctctgtgctaaaagaaacataaaaagaatctgcctccttttcagggaagcagattctttttataatctcgttttgttgtatgacttttaaatattgaattatataattaaaaggtacatctaaaatctgattaaagttttactacgtttgttgcctgaggtccttttgcgccttctgttacttcgaactcaacagcctgaccttcttctaaggatttgaatccatccattacgagtcctgagtagtgtacaaatacatcattgccttcggaatcagagatgaatccataacctttttggttgttaaaccattttactgtacctgtcattgtgttacctccataaattgaaaataaataataaagtagatcgtattgttttttgctgaaaacaatactttgttattctagcatattcaacaatgagtgtcaaatgatttctttctgtatttgtaaaagtatacaaaaaatgtcgagctttgacgaagcgggataagcgattggaaagggggagaaaagaaatttaaaatagattgtatttgtgggatttttcgattaaaatagaaagagcaaaaaatgataaaggagaggccggaatatgaagatgtctacaaaagggcagtatgcactggaaattatggtggatcttgcactgcacctggagccggatcgcctggaaagtctgaatgatatcgcaaagagacgaaatctttcggaaaagtatctggaaagaatcatgaaactgttaaaagaagcggggcttgtaaaaagtgtgcggggagcatatggtggatattctctgacgaaggaggcgggagagatttctgttctggaagttcttcgcgccgcggaagggcagatggcaccggtatcctgtctggtggaagatatcgagtgtggaatgaattgcgatgtttgttcgacaaaaaacacttggggtgaaatgtgggagcagattttggataccacagcagacgtgaccattgcggatattgcagaggctgtaaggagaaaggcagcctgttaaaaagtactggagggcagaaaaaactgctcttcagtactttttaaattttcccggatcatttgcagcaaataaaaatatattaaatatattgacatagtaggaaaaaagaggtataacaataaaaaacattattaaaatgataggaattgaaggagggatgtaatgaaagtatcgacaagaggaagatatggactgcgtgcactggttgatatgaccattcattcgaatgatactccggtttcgctcgttcaggtggcgaacaggcagaagatttctctgaattatctggaacaggtatttggaactttgcggaaagctggaatcgtggtgagtgtaaaaggagctggaggaggctataaactggcaaaacctgcagaatcgattacagtaagagaagtgctggaagctttggagggcacattttcaatcatagatcggattcctggagaagaacaggatgcagtacaggaagcgattgaagagctggtgtggagcaggatcgatgaaacggttcatgtattgttagaacagaaaacactgaaaatgctgtcagacgagtacagacaaaaactggaacaacgcgcaggcatgtattatatttgaaaaagggcatgaaattacaaggaggaaaagtatatgtcaggaatttatcagagcgtaacagaattgattggaagaaccccacttttggaaacaaagaatctggaaaaggaacgaaaccttcaggcgagggtgctggtaaaactggaatattttaatcctgcaggcagtgtaaaggatcgtgcagcgcttcagatgatcacagaggcagaggagagcgggatcttaaaaccaggtgcggcaattatagagccaaccagtggaaatacagggatcgggcttgcatcgatcgctgcggccagaggatatcgggcaatttttgtaatgccggagacgatgagcatcgagcgaagaaagcttttgaagggatatggagcagaaattgtactgacagaaggcgcaaaaggaatgaaaggagcaatcgccagagccaaagagctggaacaggagatggatggagcagtgattttggggcagtttgtaaatgcggccaatccaagagcacatgaaaaaacgacaggacctgaaatttgggaagatacaatggggcaggtagatatctttgtggcaggggtcggaaccggaggaacgatcacaggaaccggtgcatatctgaagtcggtgaattcatccattgagattgttgcagtggaaccggcatcatcggcagtgctgtcgggagaaaatccgggtccgcacgggctgcaggggattggtgcagggtttgtgccggatgtgttgaatacagaaatatatgatcggatttccaaagtaaaggagcaggaggcatacgaagcggccaggctgttggcagaaaaggaagggattctggttgggatttcatcgggagcagcattgtctgcagctcttttggaagctgaaaaagaagaaaaccgtggaaaaacaatcgttgcactgctcccggatacaggagaaagatatctgtccactccactttttgattagaaaattcggtgaaaatgtaaaaaagcactgaccggatgcgggatatttcttacagaacgcaggttgaaaaaaagcaaaaaatagtatatactacaaagaaaaaaggcaaaaggagttagtgctatgaaagaatttaaatatgtagtgacagatgcagaaggaatccatgcaagaccggcaggactgcttgtgaaaaaggcaggagaatttacatcttctgtaacaatcgcaaaaggtgagaaatctgcagatgcaaaaagaatttttggcgtaatgggacttggagtaaagacaggagaagaagtgacgatcacagcagatggtgctgacgaagatacggcgattgcagagctggaagcattttttaaagaaaacttataattcctataaagttcagaggaaagtattatgattacaataacaggaaaaagtgtatttggtggagtgtccattggaaaactttctttttacaaaagaaatcagaaagtgatcaagagagaacacgtagaagatgtagaagcagagtgtgcaagatttcaagaagcaaaagcagagggaatccatcagctgaaagaactttatgacaaatctattgcagatgtcggagaagcgaatgcgatgatttttgagattcatcagatgatgctcgaagatctggattatattgaatctattgaaaacatcatccgttctcaggaagtgaatgcagaatttgcagtagcaactacagcagataattttgcacagatgtttgcggcgatggatgatgcctatatgcaggggcgggctgctgatgtgaaggatgtgtcagagcgtgttcttgatattctctgtggagtcagtgaaggaatcaagcagacagatgagccgtctattattgcggcggatgatctggccccaagcgagaccgtgcagctggacaagagtaaggttcttggttttgcaacgatgtatggttcttccaactctcacaccgcaattctggcgcgtacgatgaatattccggctgtgatcgggctgggagaaggcctgagtcctcagtatgacggggagatggcgatcattgatggttttaccggaacgctgtacattgatccggatgaagagacactttccatcatgcagaaaaagcgggaagaagatctggagaagcgggcacttctggaacaactgaaaggaaaagaaaatatcacaaaaagtggtcagaagatcaatgtatatgccaatattggaaatgcatctgatgttggtgcggttttgaaaaatgatgcaggtggaatcggtctgttccgcagtgaatttttatatttggagaatgagacattcccgacagaggagcagcagtttgcagtatacaaacaggttgcagagaatatggcagggaaaaaagtcattatccgtacactggatattggagcggacaagcaggtagactattttgaactggacaaagaagaaaatccggcattaggctatcgggcaattcgtatctgtctgacaagaccacagatctttaagacacagctccgcgcactttacagagcagcgttttatgggaatatttcaatcatgttcccgatgatcatttctgtatccgagattcagaaaatcaaagaaatcataaaagaagtaaaagcagaattgaaagagcagggaatcccatataaagaggatgtagaattaggtgttatgattgaaacacctgcgtctgttatgatcagtcgtgaacttgcaaaagaagtagatttcttcagcgtgggaacgaatgacctgacacagtatacactggcgatcgaccgtcagaattccaaactggatgtgttctatgatccacaccatccggcagtattagcgatgatccgcatggcagcagagaatgcgcatgcagaaggaaaatggatcggcatatgtggagaattgggagcagatctggaattgacagaagcgtttttgaagatgggactggatgaactttcagtttctccatcgatggttcttccgttaagaaagaaaatccgcgattgcgaataagaaacatataaaaagacattgcctcagataaaggcagtgtctttttttgtgcgagaaagtcttgatgtatgtaatctgctgtctgtgaaaaagaaactaaaaaacttcttgcaaacatatgttctggatgatataatacaaaaaagaacatatgttctaaaggaggaatacgcaatggaagtgattcaagaaaagctgtcaatttatgaaaaacttcagatcctgacagatgcggcaaagtacgatgtggcatgtacatccagcggagtcgaacgcaaaggggatggcagcggtatgggaaattgtagtaaagccggaatttgtcatagtttttctgcagatggaagatgcgtttctcttttaaaaattctttttacgaatgaatgtatttatgattgcaagtattgtatcaaccgatcgtcgaatgatgtggttcgaacgtcgtttacgccggatgaggtctgtacattgacgatggagttttatcggagaaactatattgaagggctgttcctgagttccgggattctgaaaagtcccaactatacgatggaattgctgtattcaacgttgtataagcttcggcacgtttataagtttcaaggctatattcatgtaaaggcgatcccgggtgcagatcctcttttgattgaaaaagttggatttttggcggatagaatgagtgtcaatttagaattgcctacagcagagagtttgaggattctggcacctcacaagtccagaaggaatatactgatgccaatgcgattggtgcagcagaagtcgcaagagaacaaacaggagcttacattgtatcaaagtgcgcctcgttttgtaccggctggtcagagtacgcagatgatcataggtgcttctcaggagacagactatcagattttacgtgttgcagaatctctttatcagaagttcggattaaaacgtgtattctattctgcgtttgtggcggtcaatgaagataaagcacttccggcaaaaacatcagacggcccgccgcttcttcgggaacacaggctgtatcaggcagactggctgcttcgttattacaaatttgaagcagatgaacttttaaatgaaaaaaatcccaattttaatattttcttagatcccaaatgtaattgggcattgaatcatctggaatattttccggtagagattaaccaggcttcctatgatgttttactgagggtcccgggtattggttataaatcagcgggcaggattgtaaaagcgagacggtttggatgccttcattttgaagatctgaaaaaaatgggtgtggtattaaagcgggcactctattttattacttgcggtgggaaaatgatgtataaaaccaaaatagaagaagattatattacaaggaatcttttgaacacgaaagagaggctgccggacagtgttacaggattgagatacaggcagttatcgctgtttgatgatgtgaattttacagaaaatcagattgtgacgatggtgtaacaggagaaaaacatgaaaaagatttatatatgcagagatgacagaacagagattttttcggcaatttacgatgcatggaaagaagaccgcaatcaagaggtggggatcgggattcttgggaagatggagcagcaattgttttgcgaatatgcagaagttacgccatctgaaaaaaaggtacaggcagtggaacagttgatccgaaactacatgggagagcagacgtatgcggatatttcctatgcgctgcttagtgaggatgcgatgaaggcagaagcagtgtttcatgtcatgcaggcggccagatatgtaagaccgagtaataaaattatggattttcttggaaatccatctgtggcaaaagtattcgaaatgaaacgaagagtttccaatgaggcacattattttattgagtttgtcagattccgggaattaaaaaatggaattttgttttccgaaatcgagcctaaaaacagagtgcttacatgtattgcagaacatttcacagatcgttttccgagagaaaactgggtgatctatgaccgtacacatgcggaatttttagtgcatccagtgggaaagcgctgggttctggtgcagggagaagaactcgatcaagaggtgacaggacagattacagaagcacaaagagaatacgaaaaattgtggaagggattctttcaaaccatttccattcaggagagagaaaacttaaaatgccaacagacacatatgcctgttcgatatcgcaaaaatgtaacagaattccaataaaaaactattgtataatcatggaagttagtttaacataagggtaacaaagtggcattgataagcgaaaggaaggagaggtatggagagagaggcaataatctggctggtgctttttgttattctgttgattgtagagctgctgacagtcgggctgacttctatctggttcgcaggaggagctctggttgcattgatcatggaacttttgggagcaaatttgttctggcagatcggagcatttattctggtttcatttctgcttttgtatttcacgagaccatttgcagtaaaatatgtcaatgcacatcatgaaaagacgaactatgagcaggctgttgggaagattgtcaggattacagagagggtagataatcttgctcagaccggaaaggggattttggatgggatggaatggactgtaagaacagtcggaaaagaagttctggaaaagggggatctggcaaaagtaatccggatctccggtgtaaaattgattgtggaaccgcataaggaggattaaaaatgggactgatagtgtttgggattttattgatactgatcatattgatcttggcggcaaatatccggatcgtgccacaggcgcatgcatatatactggagcggctgggcggatacaaagaaacctggggagttgggattcattttaagattccgattttggatcgtgtggcaaaacgagtatctctcaaagagcaggtcgttgattttgagccgcaggctgtgattacgaaagacaatgttacgatgcagattgacacggtgattttttttcagatcacagatccaaaacagtatgcatatggggtggagaatccgattgcagcaattgaaaatctgacggcgacaacgcttcgtaatatcattggagatcttgaattggatgagacattgacttccagagagacgatcaactccgagatgcggacttctctggatattgcgacagatccatggggaattaaagtcaaccgtgtggaattgaaaaatatcatgcctccgactgcgattcaagatgcaatggaaaaacagatgaaagcagaacgtgagagacgagaagcaattctgaaggcagaaggagaaaagaaatctaccattttagtggcagaaggaaagaaagagtcgttgatcttggaggcggaagcggaaaaacaggctgcgattttgaatgcggaagcggaaaagcagaagcggatcaaagaagcagaaggacaggcagaagcaatccgcacagtccagaaggcgactgcagaaggaattgagtttatcaaacaggcaggtgcagatgatgcggtgctgaccttgaagagtctggaagcatttgcaaaagctgcggatggaagggcaacaaaaattattattccttcagagcttcagggcattgcaggactgacaaagacaattgcagaagtagcgaggacggataagacagtagagtagaggatatgaaagaagaaacaatcataaagatatctgttcgaaatcttgtggaatttattttaagagaaggagatattgacaaccgggtgtccggcagtatggaaaaagatgctatgctgctgggcagcaaaatacatcgcaggatacaaagtcgtatgggagacaactatacagcggaagttccgttgaaaatacagattccgtgcgatgggtttgttttgcagattgaagggcgcgccgatgggattcagaaggatgacggaaatgttctgatcgatgagatcaaaggagttttacgaagtctggaacatctggaagcgcccgttcctgttcatctggcacaggcaaaatgttatgcttatatttatgcggctcagaatggtctggaccgaataggagtgcagatgacctattgtcagatagaaacagaagaaatccgcagattttcacaggcgtttgaatttggagtgctccgggaatggtttcagaacctggcagcagaatatgagaaatgggcaaagtttgaaattgaatggcggaaaatccgcaatgattctattcaaaaaatcgaatttccatttccgtatcgagaaggacagcgggatctggtagcatcggtgtaccgcacgattttgcgaaagaaaaaattgtttatccaggcgcctacaggtgtcggaaagacaatggcaactgtgtttccggcagtgagagcagtgggagaaggtctgggagaaaagattttttatctgactgccaagacgatcacaaggacggtagccgagcaggcatttgcgctgttaaaagacaaaggattgttgtataagacgatcacattgactgcaaaagaaaaaatctgcttttgcgaggaaacagagtgtaatccggatgtttgtccttatgcaaagggacattttgaccgtgtcaatgaagcagtgtttgacctgattgcgaattctcataactggaacagggaaatattggaagaacaggcgagaaaatatcgagtctgtccttttgagctgtctttggatgtgtccaattgggcggatggaatcatatgcgattataattatgtgtttgatcctcaggcacatttaaaacgctttttttcggaaagcggacagggagagtatttatttctgatcgatgaagcacataatttggtggaacgtgggcgggaaatgtatagtgcatcgctgtataaagaagatttgctggaagtgagaaagttgataaaagcagaggatcccaaactggcaaagtgtttgtcggaatgtaatcagcagtttttagagctaaaacgagagtgtgagcattatcagatcttgaaaagtgtgtcacatattgcactaaagctgatgaatctgctttccaggatggaggattatctggaagcctgtgaggattcggagaagaaaaagcaggtgttggatttttatttttctgtacgcagctttttgaatattcatgaaattctggatgagaattatgtgattttttctgagatgatggcagatggaaggtttcagatccgtttattttgtgtcaaccctgcagtaaatcttgaaacatatctggcacagggaaacagtacaattcttttttctgcaaccttgcttccaatccattactataagaagctgcttagtgttgaacaggaagactatgcagtgtatgcgcacagctcttttccccaggaaaacaaactgctttttatcgggacggatgtaagtactcgttataccagaaggggagagtgtacatatcagaaatttgccaggtatcttgcagtgatggccggacagaaaaaagggaattatatggcatttttcccatcgtattattttctcgaaaaagtgtatacatgcttccagcagtgcgggtatggcacagcagtagaaagcatttgtcaggttccacatatggacgaagaacaaagagaaaagtttttgaagatgtttgagcgggagagagaaaagagtttggtcgctttttgtgtaatgggcggtattttttcagagggaatcgatctgacagaggataagctgattggagcagtaattgccgggacagggcttccgcaggtctgtacagagagggaaatcttaaagtactattttgattcggcagggatgaatggatttgattatgcatacctgtatccgggaatgaataaggtattgcagtctgccggcagagtgatccggacagagggggacagaggagttatcttattgttggatgatcgatttcgggaaatgaggtatcgggaggtgtttccgagagagtggcagcagtatcatgtgggagatgcagaaagtttggaacatgaaatacggactttctgggaaagtccgtaatccatattatagatctgttgaggttttctcgtcaaaaaaactcaggaattcttttgcagcttttgaagtcagaacctgttcgttataggcgatgacaagttcgcgggcaggcagttcctcttctgtttctacagcgaagagatcagaagtttgttctgacagacaaaagtttggaataaatgcgattccaagtccgattcgggcaaggtcgatcagaagatcgttgctggtcagttcgatttcaggaaccagatccaactgatgctgttgaaacaggcgatgcagatattcgctggtggtactgtgtttatccaacatcagaatcggatatttggacagctcctgataagacagctttttgcctttcagttctgcgaaatcctcgttggcaataaacacatcatggaattttttgattttcttaatggaagagacgttacttaaatagctgttcggatagttgactacaatcagatccacttgtccggattccaacagttccacacatttgatagaagtctggttgactactttgatatgggcatttggaaatgcctcgtggaatctttttaaataaggaaccaggaaatatctgcagattgtatcactggctccgatgcggatttgtcctcctgtagaagctgcgtccagaagctgagattctccgcgctggatcaggtgcatggcaggttctatgtgacgaaggaggatttccccttccggtgtgagttgaacttttttagtactgcggataaaaagtacctgatccagtttgcgctccagtgttttgatggactgactgacggcagactgggagatgaaaagctgtttggatgcttctgaaaaacttaacgtggatgctacgtgaaaaaatactttatatagttcgtaattaatatccattattagacctcctaataagtgctttttgtattatagggcaaaaatgaatgaattacaatctataatgtgataaaatatataagaattacaaaagattataagaagacacaaaaacagaaaagaggggggaatggatgaaaaaagtacaatggattgtgggagtggtgttttcgatgtcattgcttctggtattgctcattactagctttcagcttgcagcgtatggagattttacattttatcaaaaagaatatgaaaaatatgatgtaacctcagctttggacatgaagatggaagatgtgatgtatgtaacccgggaaatgatggattatctgatcgatgacagagaaaatttggaagtatatacagtagtagaagggcggaaacaggactttttcaatgagcaggataaacttcatatgatggatgtaaaacagctgtttctgggtggtcttctgttgaggaaagtggcagcagcagtgatggtggtctgcctttgcatcctttttgcgacaaaggcagagtggaagaagattctggcaagagggtatcagatcagtctgggaattactgcggtggcagtcgtatttgctgcgggtgcattgatagtggattttaatgcagcatttaccgtatttcatgaagtgttttttaccaatgatctttggatcttcgacccggcagaggactatatgatccgaatgcttccggaaggctttttttatgatatggtactgcgtataggcggtatttttatagttggaatgtcggtggttttattgatcagcctatttctctcccggcaggggcgaaagaacagaaaaattaaaagaacttatgagtgagtttaattatattaattatacttatgagaaaaagtgtgatagaattacgataaaaagagttacttaatgactgaaaagtgcaaaggagattgtatatgagcaacgtaaagcgcgtatatgtggaaaagaaagcagaatttgccgtacaggcaaaagaattaagacatgagatcagaagttatctcggaatagagacagtaacaggtgtcagagttctgattcgttatgatgtggagaatctttcagaagatacctttgagaaagcatgtaatggcatttttgcagaacctccggtagatgttctgtatcttgagagttttccggcaaaagaagaagatcatgtgttttctgtagaatacctgccgggacagtttgatcagagagccgattccgcagaacagtgtgtgcggtttatcaaagaagatgaggctgcggtgatcaaaacagcaacaacgtatgtaattgaagggaatgtgacagaggaagaatttgcagcgatcaagaatcactgcatcaatccggtggattccagagagactggaatggaaaaaccagaaacattagttacagtttttgaagaaccagaagatgtaaaggtgtttgaaggtttcgagacaatgccggaagaggaattgaaagtgctgtatgattctcttggtcttgcaatgacgtttaaggatttccagcatatccagaattactaccatgaagaagaacacagaaatccgaccatgacagagatccgtgtgctggatacatactggtcagatcattgccgtcatacaaccttctctacagaattaaaagatgtaacatttggcgaaggagactacaaagagccgatcgtcaatacctacaaacagtatataagagatcatagtgaaattttcaagggaagagaagacaagtttgtctgcctgatggatctggcgctgatggcaatgcgcaaattgaaaaaagaaggaaagcttgcagatcaggaagagtctgatgaaatcaatgcatgcagtatcgttgttccgattaaagtagatggagtagaagaggaatggctgatcaactttaaaaatgagacccacaatcatccaacagaaattgaaccgtttggtggagcagcaacgtgtcttggcggagcgatccgggatccgttgtcaggacgtacgtatgtataccaggcaatgcgtgtcacaggagcggcagatccgacggtatccgtgaaggagacattgaaaggaaagcttccgcagaaaaaactggtcagaggagcagctcatggatatagttcttatggaaaccagattggattggcaacagggcttgtaaaagaaatctatcatccggattatgtggcgaaacgtatggagattggagcagtcctcggggcagcgccaagacgtgcagtaatcagagaaaattcagatccgggagatattatcatattgcttggagggcggacaggacgtgatggatgcggaggcgcaaccggatcttccaaagtacatacagaagagtctatcgagacttgcggggcagaagttcagaaaggaaacccgccgacagagcgtaagatccaacgtttattccgcagggaagaagtaagtcgactgatcaaaaaatgtaacgattttggtgcgggcggtgtctctgttgcaattggggaattggcagacggactccgtgtagatctggataaagtgccgaaaaaatatgcgggtctggatggaacagagattgcgatttcagaatctcaggaaagaatggcggtggttgtcgatccaaaagatgtggcagagtttatggcttacgcaaaggaagaaaacctggaagcagtagaagtcgcagttgtgacagagtctccgagactggtgcttgtatggagaggcaaagagattgtcaatatttccagagcattccttgacaccaatggagcacatcaggagacaacggtagaagttgaaattccgtcgaagaaagatagtctgtttgtaaaagaagaagtaacagatgtaaaaacaaaatggctggatacgttgaaagatttgaatgtatgctctcagaagggtcttgtggagatgtttgacggttctattggggcaggttctgtatttatgccatatggcggtcagtatcagatgacagagacgcaggctatggtcgcaaaggttccggttatgaatggaacgacagatgctgtttccatgatgagttatggatttgatccatatctgtccagttggagtccatatcatggggcaatttatgcggttgtagaatctgtagcgaaaattgtggctgcaggaggagattacagaaagatccgttttacattccaggaatatttccgccgtatgacagaggatccaaagagatggagtcagccgtttgcagcattgttgggcgcatatgatgcacagcttggattcggacttccatcgattggaggaaaagacagtatgtcgggaacattccaggacattgatgttccgccgactcttgtatcttttgcagttgatatggcaacagaggatgaaattatcactccagaactgaaaaaagcaggaaataaactggtttggatgaagattgaaaaggaccactatgatcttccggtttatgaacagttaatggatcagtatggcaaatttgcggcagatatccacagtggtaagatcgtttctgcttatgcactggatcgtcatggtgtgatcgctgcagcaagtaagatggcatttggaaataaactgggagtgaagatagaacataatctggatgcgggagaattgtttgcacctgcatttggagatatcattgcagaagttcctgcggagaaagtgggagaactgagcattgcttatacggtaattggagaggttctttccgaacagaaatttgcatacgccaatacagagatcaggatcgaagaggcagaggaagcatggacaaaaactctggaaagtgtatttgctacaaaatcttctgcaagcagtgatgaagtagtggaagaaaagctttacaatacatccgacattcacatttgcagccataagatcggacagccgacagtatttattccggtattccctggaacaaactgtgagtatgacagccgtaaagcgttcgagagagcaggtgcaaatgtcattacaaaagtattccgcaatatgaatgcagaggatatccgtgattcggttgctgagtttgaaaaggcaatcggacaggctcagatgatcatgttcccgggaggattcagtgcaggagatgaaccagatggttctgcaaaattctttgcaactgcattccagaatgcgaaaatcaaagaagcggtagaaaaacttctgaatgaaagagatggactggcacttggtatttgtaacggattccaggcgctgattaaactgggactggttccatacggaaaaattgtaggacagacagaagagtctccgacattgacatacaatacaatcggacgtcatatttcaaagatggtttacacaaaagttgtgacaaacaaatctccttggcttgcgggagcagaactgggcggtgtttatacaaacccggcttcccatggagaaggtcgtttcgttgcgagtgaagaatggctggataaactgtttgcaaatgggcaggtagcaacacaatactgtgatccgacaggagttgtcagtatgaacgaagagtggaatgttaatggttcttaccgcgcgattgaaggtatcacaagtccggatggaagagtgctcggaaagatggcgcattcagaacgccggggtgactctgtggcaatcaatatttatggagagcaggatctgaagatattcgaatccggtgtaaaatactttaaatagagaaattggaaaaggcgctttgaaaaaagtgccttttcgaaaaatgtggaaaaaagtagaaaaatactattgacaattaaaaatactaatagtataataatcaagcaagttgcggttgagaatacagtgacttgaaaatatggggtcttagctcagctgggagagcatctgccttacaagcagagggtcacaggttcgagccctgtaggccccatagatttaattgaatatggcggaatagctcagttggctagagcacacggttcatacccgtggtgtcgctggttcaaatccagtttccgctatgaaaagagaggtctgaatttcagatctcttttgtttttgcaggaagagtgaaatgaggaaaatgaaaaatgctgatgagtattgcgctgatgttgttatctggtatgtggatggcatggatttgtaaaagggtacatcttccgggactgcttgggatgttgttgacggggatcgtgttgggcccctatgtctggaatctgattgatgattcaatcttaaatatttcaccggatcttcgcaagattgctctgattattattttgacaagagcgggactgtcacttcagttggaagatttgaaaacaataggacgtccggcaattttgatgtgttttgttccggcctgttttgaggtgttggggatgattttactggcaccacgttttttgggcgtttctgtgttggaggcagcgattatgggggctgtcgtaggtgcggtttctccggcagtgattgttccgaagatgctgaagcttatggaagaaaattgtggaacgcaaaaaggagttccgcagctgatccttgcgggtgcttccgtagatgatgtctttgtcattgtactgtttacagcatttacaggagctgcacagggagcagtggtatccgtgaaaagttttgtagatattccagtttctatcatactgggtgtcgtgataggaacgggtgttggatatttgctggcaattctttttgaaaaagtacacatcagggatacttccaaggggatgattttattgtgtgccgcatttatcttagtgactgtagaagatgagttttcaggagttatcccgtttgcgtctctgattgcggtcatggcagtgggaactgctcttcagaaaaaacgagaggaagttgcggtacgattgtcggtaaagtttaataaattgtgggttgtagcagagattatgctttttgtacttgtaggggcaactgtagatgttcactatgcattgtccgcaggtgttgaaacggttgttttgattttgggtgcattaatttttcgtatggcaggagttttcttatgcttgttcaaaacgaacttcaatttcaaagaacgaatgttttgcataatcgcatatataccgaaggcaaccgtacaagctgcaattggcggaatcccactggcgatgggactttcctgcggaaatctggttttggcagcagcggtggtggcaattctgatcacagcccctcttggtgcatttctgatcgatctgacatatcaaaaattgctgcagtaggctgtatttttgaaacgaaagctgatatactaatgaagtaaaatgtcagaaaaaggagtgtgtgagatagagatgaattttcaggagaagcaacaggaatacgcaagactgatcgtagaaaatggagctgcagttcaaaaaggacaggagctggttctgcgttgtccggcagagtgttgggaatttggcaggatgatcgtaaaagcgggatatgaggcaggtgcaaaagaagtgatcgtgcactggggcgatgatgaggtagcacgtttaaaatatgaatatgcaccactggaagtgtttgagagtgttccgcagtggcgcgcagattctatgaatatctacgctgaaaatggagctgcatttatcgcaatcacagcagaaaacccgaatgcatttaaaggggttgacagagagaaacagatggctgcggcaagagccaatgataaagcattggaaccttattataagcgtatggtgtccagtcaggtgcagtgggttgtggcggctgttccggggaaagaatgggcttgtcaggtatttccggaaaagagtgtgacagaagctgtggcaagtttgtgggaagcgattttctgtgctgttcgtattcaggataacgatgcagtagaggcgtggaaagaacacgatgcaattcttaccgaaaaatgtgagattttaaatcagtatcagtttacaaaactgcattataaaaatggagctgggacggatttttatgtgggacttgtgaaaaatcatatttgggaaggtggatcagaagtatccggggcaggagtgcgttttattgcaaatatgccgacggaagaagtatttacgatgccggattatagaaaagcggaagggaaagtcgtaagttcccgtccactgagttatcgtggaaatctgatcaaagagttcagccttacattccatgaaggtaaagtagtggattttgatgcgaaagagggctatgatgcattgaagcagctcctggaaacagatgaaggttcgaaaagtctgggagaagtggcgttagttccatatgcctccccgatttcggagatgggaattctgttttataatacgctgtttgatgagaatgcggcgtgtcacttggctctgggagaatgctatccgacaactgttcgcggcggtgagaaaatggatgaagaggagctgcatcagattggcgggaatcattccatcaatcatgtggattttatgattggtacagcagatatgatgatcacgggaatgacggaagacggaaaagagattccgatatttaaagatggaaactgggcactgtaaatgaagaattttttgcaataatttgaaaaattagaaaaaaagtgaaaaaagggttgacattctttgttttgaatagtatactaacaaagtcggttgcgggaaacgcagccgacggatatggggtcttagctcagctgggagagcatctgccttacaagcagagggtcacaggttcgagccctgtaggccccataccataagaatgcggcggaatagctcagttggctagagcacacggttcatacccgtggtgtcgctggttcaaatccagtttccgctactgaaaaagaagtccttgaatgagggcttcttttttgttacaatcagagaatgaaaagaaaggccggaaacatacggcttgtaaggaggcagaagatgaataaaaagtcatggatggtattgcggattgtggcaggaatgtatctggcgtttttggggattcagattatttcacaggtatccaaagaacagccaagtaatctggcgttgatggtatgtgccgcagttgtgtttattggtgttggagttgcatatgcaggagctgcgattcggagcatttttaagatgagtaaaggagaagaaggtcgggaggatgatcttcaaatggcagatcaggagtattttgagagacaggaagtacgcagagaagttccggatattcagctgaagcaggagatgactgcagcagagacagaagaaaaagaagcgtctgaagaagaaaggagcgaggaagatgcgaataggaatgggatatgatgtgcataagttagtagaaggaagaaaactgatccttggcggcgtggagattccatatgaaaaaggacttctcggacattcggatgcggatgtacttcttcatgcggtcatggatgcgcttctgggtgcggctgcgcttggcgatatcggaaagcattttccggataccgatccggcttataaggggatttccagtatcaaattactggaacatgttgcggcgctgctggaagaacatcagtttttggttgaaaatattgatgcgacgattattgcacagagaccaaagatgaggccacatatcgatacaatgcgtgaaaatattgcacaggcattaaagatagaactggatcagatcaatgtcaaagctacgacagaggaaggccttggatttaccggaagcggagaggggatttcctctcaggcagtctgcatgttggaaaaggtgatgaattatagcagtgtggatgtgacagaagaaaccggcgggtgtgccggttgcccgggatgcaaacaagcatagtagacaggagaagaggaatgaacattcgcaagctggaaacacaggaacacgaaaagacccgaaagttgtgggaagacgtttttttggaagatacacaggcgtttttggattattactattttatcaaggcaaaagagaatgaaatttgggtgatagaagaagaggaagagattcagtctatgcttcagttgaacccttatccattgtcagtggcagggcatcgttttctatgttgttacatcgttgcagttgctacaagaaaagagtatagaagccgcggatatatgggcagtcttttgcggagagccatgcagcaaatgtatgaaaagaaacagccatttacgtttttgatgccggcggcagaaggtatttatacgccctatgattttcgttttgtctatggtcagagacaggcagtgttcgaaagaagagaagaagcagagccagtggatgaaacagatgcgactttgtttcaggcaggggaactggcaatgtttgcggaagaacggcttgccggtcaagcgcgggtatacgcagaacgagatgcacagtattatcagacacgagtactggaacaacagagtgaaaacggcgggattcggatgttgagaaaggatggaaagctggtaggaagttattgctatgcaaaagaggaaatctgcgagattttagagcctttgatccttcccggctatgagcatgtatttctggattcgatatccggatttgatgaagatgtggtgaaagtgctggcatgcccggatgaacttgtatcctgtgcaaaaaccgcagagacaaaaccaatgatcatgatccggatccttcggttagaggtgttgttctcgacgctgcaggtcagagaaggcgaatcgctgtgctgttcctttgcggtgatcgatccgattttaaaaggaaacagcagaatctggagattgtgcagtctggaagaaggcgggatccaggcaacagagacagaagattcgcagggagtgctgacgattggtgcattgacagaatttgtttttgggtatcgcagtgtttcggatctgaacagtgatccggacgtgcatcttagtcaagaactggagcaggagctggagaaaattcttccgttgtcgccagtattcttaaatgagattgtgtgaaataagttgacaaaacagaaaaatttgcataagatatattctgtattgagaaataaaaataaaggcttggaacgaaaagagtatctggtcatacgctcacagagaggaattgtcatcggctgaaagcaattccgggaaagaagccggagaagtgcattcgggagctgattctgcgaacatgcaaaaaggtgtcagtagcaggatacgtgttgcatacgttacatgtaatgagtgaaagaatcagattcttttaatagagtggaaccgcggaaaaacttcgtctctaagtatagagacggagttttttgttttcggtgcggtgaaaaaagtcaggaggatgtcatatgggaatgctgtcttatatccgggaagagattcaagtgataaaggaacgggatccggcgatcaaatcgaacatggaagtgctgttatatcccagttttaaagtgatcttgcgataccgggtagcacataaattgtacttgaaaaaacattactttctggccagatggatctcgcagcgtgcagcccggaaaacgggaatagagattcatccgggtgcacagattggaaaagggttatttattgatcatggcagcggtgtgatcattggagagaccactgtgatcggagacaatgtgacgctgtatcaaggcgtgaccctgggaggaaccggaaaagaacagggtaagcggcatcctacactggaggataatgttatggtcagtgccggtgcaaaaattctgggttcatttacaatcggggaaaattcgaagattggagccggttcggttgtgctggaagaagtccccccgaactgtaccgtggtaggagttccggggcggattgtaaagcgagatgataagaaagtactccgaagcgagatggatcagattcatctgccggatccggtgctgagtgatatccgcagccttcagaaagagagtagagaacttcacagccagttgacagagatggtgcagaagatgcactgtatgaaaccgtgcgaaatagaacagacaggagaggagaaagaacatgaaactgtataatacaatgtcaaaaacaaaagaggagtttattccgttggaagaaggtaaagtcaagatgtatgtttgtggaccaacggtttacaattttattcacatcggaaatgcaagaccgatgatcgtgtttgacacggtcagaagatattttgaatacaaaggatatgatgtgaattttgtatccaactttacagatgtagatgataagatcatcaaaaaagcgaatgaagaaggagtgacggcagaagaaatatcaaagcgctatattgaagagtgcaaaaaggatatggaaggcatgaatgtcaaacctgcaacaaaaaatccactggcaacagaagaaatcggcggtatgatcgaaatgatccagactttgatcgacaaaggatatgcttacgaaaaaaacggaacggtgtactatcgtaccagaaaatttgaaggatatggaaaattatcccataaaaatctggatgatctgcagtccggcggacgttctcttcttgtaaccggtgaggatgagaaagaagattctctggattttgtgctctggaagccgaaaaaggagggagaacctgcctggaagtcaccatggagcgaagggcgtccgggatggcatatcgagtgttccgagatgtcaaaaaaatatctgggagagcagattgatattcatgcgggcggagaagatctgatcttccctcaccatgaaaatgaaattgcacagagtgaagctgccaacggaaaagagttttccaaatactggctgcacaatggattcttgaatatcgataaccgcaagatgtccaaatctcttggaaatttctttacggtacgggaaattggagaaaaatacgatcttcaggtactgcgtttctttatgctgagcgcacattacagaagcccattgaattttagtgcagaattgatggaagctgcaaaaaatggactggagcgtatcgtgacagcagcagaacatttgaaattccttctggaaggcgcaaagacagaaaagatgacagaagaagagcagaagaagacgcagacaagtgtggaatttacagaaaaattcgaaaaggcaatggatgatgattttaatacggcagatgcaatcgcagcagtctttgatctggtgaaatttatcaatacaaatacagatggtgaaagcagcaaagagtatctggaaagcctgttaaagcgcctgatcactttgacagatgttctggggattgtcgtagaaaaagagcaggaaatgctggcagatgatattgaagctctgatcgcagaacgtcaggctgcaagaaaagagaaaaactttgcaagggcagacgaaatccgtgacgaattgcttgcaaaggggattattctggaagatacaagagaaggggtaaaatggaaaagagcgtaaattttgaattcagggatcggatggaagatctgtttcagttaaaagcggtggatacgttatcgtattctccgcttgtgctggcatatatcggtgattgcgtgtacgatctgatcattaagagtatggttatcaatgcaggaaatcgtcaggtgcagaaactgcatcaggcaaccagcagatatgtacaagcttctgcgcagtcatttatgatgcgggcaatgcaggagcagctgacagaagaagaacatgcagtttataaaagagggcgaaatgcaaaatccatatctcctgctaaaaatcagtcgattacggattatcgaagagccaccggatttgaggcactgattggatatttgtatttaaacaaacagtatgagagattattggcgcttataaaaattggactggatagtctggaagaaaatcagggagaagaagatgcaggagaataaaaaagaatttgataatacagagcacacccttgtgatcgaagggcgaaatgcagtgttagaagcattccgttcgggaaagacgatcgataaagtatttgtgttggacgggtgtcaggatggaccggtacgtaccattgtaagagaggcaaaaaagcatgacacgatcatcaattttgtggggaaagagaggctttctcagatttcggcaacaggcaagcatcagggtgtgatcgcatatgcagcagcctatgagtactcagacgtggaggatatgctggctctggcaaaagagcggggagaagatccgtttttaatcctgcttgataacattgaagatccgcacaatctgggtgcaatcattcgaactgccaatctggcaggtgcacacggggtgattattccaaagagaagagcagcaggactgactgcaacagtggcaaaaacatcagcaggagcattgaattatacaccggtagccaaagttacaaatctggcgaagacaatggaagaactgaaggaaaagggactctggtttgtgtgtgcggatatgggcggagagtccatgtatcgtctgaatttgaagggaccgatcggtctggtgatcggaaatgaaggcgaaggtgttggacgtctcgtaaaagaaaaatgtgactttgttgccagcattccgatgaagggagagattgattctctgaacgcatcggttgcggcaggtgtactcgcttatgaaatcgtacgacagagaatgatgtaaggataaaatggaggatataatgcagggaaaccggtatgaaatgctgacagatgaaaaattgatcgaagaactacgtggcggtgactctgcgatcacagactatattatggataaatacaagcccctggtccgaaaaaaagcaagagcgatgtttcttcttggcggagagaatgaagatttgatccaggaggggatgatcgggctttttaaggcaatccgtgattatgatgccggacagggggcgtcctttgcaagttttgcagaattgtgcgtttcaagacagatgtacagcgctatagaagcatctcagagaaaaaagcatttgccgttgaattcctatatttcgttgtatgaagaggcggtggaaggcgggaaaaaggttccactgatcgacaccatcgaaccacaggaagagaataatcctgaagcgttgtactttggaaaagaatttacggagattttttcagaacagttaaaagaaaatttaagtacactggaaaatcatgttctggaactgcacctgatgggaacagattatcgaaaaattgcagaattgcttggcaaaagtcctaaagcagtggataacgcgctgcagaggatcaaaagtaaggcgcagaaattgctgcagatggaaagtagtgtgtgaaacagaggggattgttatggcaacaattaaggaaattgcggagcgggcggcacaggaggtcgcctgttaagaaaaaatggaaagcaaggattctagaaaatgtgatagaaaaatattgacagaataaacgaatctaatgtataatgtcagtgttgtgtttatcacataagctgctatggcgcagtcggtagcgcgtcgccttggtaaggcggaggtcgggggttcaagtccccttggcagctttataagaaaacgtgtcacgaaagaagtttgagagttctttcgtggcacgtttttttgtttgtgttcccgtcatctgctcttcctaacggggaactttgttggaaatgacattttgttttacgagttttcgtcctcttctaccagttttaaaatatcagtcaattcacagtttaaatattcgcacagtctggcgagaattttcaggtcaattctggatatcttatttttgcagtagttgtttaattgagttcgctgtaaattgcagtttttgcagacggaatttttactgattcctttttctttcaatactacgtccaaatcgatgattatcttattcatatctacacctgcctttcttaaagtatatgtgcagttgtataaaaatataagatgcaatataatatagatgtatgaatttacacctgcataaaaatataacggagaaaaaaagtgaaaaataaactaaataatatcataatagtgggaatttcagtggctattctgtgtcagtttctgtatcagaaaccagaagtacgttctacgacagttgattgcacgcagggaacatgtacgctttgggtggaagtgaatgcgaacagatggaatgtagacaatcgggagctgtttgcagaaacattgttagaaatgacccataaaaacaaatttcggaaagtgcagttcagcaaagatctggcagaaccggaccatattgtttttcgggtatattctacgcagtatcaatcgaagtggatgtttgaaatacagtgtcagagacaaaaaaaggacacgcaccaatgggaggtacgtgtccgggagaacgaatcataatgcttcagaatctaaaatgatcgtaaaaggtccatcgttgacaagagcgactttcatgtcagctccaaattctccggtttctacacaggagatggattgacggcatttttcaatcatatattcgtaaagactgttggctttttcaggagatcctgcttcaataaagctcggacgatttccttttttgcagttggcatataaagtaaattgggaaacaagaagaaggcttccgtttacatcggcaagggaaagattggtctttccgttttcgtcttcaaaaatgcgcagtccgatcatctttttgatcagtttgtcagcagtttcctgtgtgtctgtatcggagatgccgatcagtaccaaaaaccctttttgaatctttccgatgatctgtttttcgaccgtaacggaagcttccgatactctctggataattaatttcatctgtaaaatctcctgtctttttatggaatgatttggatttctccgattttgtgaatctcttttttgggtgcttctgcgggatatcccagagcagccattccgtatacgacatggtcggaaggaatgccaaattcatcgagaagggaacggatttcagggtcatcacagagtgtacgaagctgattgatccagacagaaccgattccaaaagaatgtgcggccagaaagatattttccagagcacaggcattgtcctccataccatgcggattgtctttttgattggacggaatgataagaacctgaggatggtacatatcatagccttgccgtcccagttttcttccgatgatttctgccagctgctgaatcttttcagggttacaaagaacagtaaacttccaggtctgcttgcccatgccgcttggagcatagatggcagtctgtaagattgcttttagctgatcatcggggatttttttggataaaaatgcgcgggtgcttctgcgtgtaagaagattttctataattgcattcatagcaaatacctcctgaaataaaatacgttactttttattgtatacttttgagaagggaaagtccagaaaaaacacgcagaggaaatcattttttattggcagcagtatagtaacaaaatgtgtcgaaaaatgtcgaaaaaagggatgaaggaagaaagattccagagacaagtatgatatacttaataataaaagtggcgtttttatacagaccgggagggggacaagatgaagaataatctggagccactgaaggatgcattggaggaattggcggattttgtcagaaagatggatcccgcagaatattcctatttttacagactggtagaacgcatggggaacaatatagaaatctgtatgctggtgcgggaagacaggtgggaaaagctggagaatattttgaaaagggactggaatctggtaaagcggatgtatgacgatatgtggaagatcgacttgcagaatgaaaaagagaggtatcgttttttacagctgctgacagagattgaatggtatctggaggaaaaaggtctgatgtctatgacagaaaaaagatatcgttatgcgaattgagagagcggcagatgcgaccggaagaggtggtgatctgccgcattttctgtgtgttgcttcttgaaaacgaatttggtatgataaataccagtaagatagaaatactgggagcaaaggagataccatggatagaacgatatatgagaattatattaaaattttaagaaaagagctggttcctgcactgggatgtacagagccgatcgcactggcatttgctgcggcaaaagcaggggaagttttgggaacattccccgatcatatgacggtccggtgcagtgggaatatcattaagaatgtaaaaggtgtgaaagttccgaattccggagggatgaaaggggtagaagcagcagcggttctgggacttgtcggaggcaatccgtcgcaggcactggaggtgctggaatccgtgacagaatccgatattgcacaggcgcaagagctgcttttgaaggaattttgcgattgctgtttaaaagaaggtgtagcgaatctttatattgaagtccatgtgacaaaggaaaaggactctgcgatcgttataattgagcaggagcataccaatattacaagaattgagaaaaatggaaaggttttatatgagcatcagggagatgtgacggaagatgaaatcgaggtggataaaagcctgctgaatctggctgatattcttgcattcgcaaaggaagtggacttgaaagatgtgcaggatgtactggaaagacagagaaaatacaattccagaattgccaaggaagggttggagcatgcatggggtgcccaggtaggcaaggtgatcgcagaagagtatgggactgctgtacagtggagagcaatcgcagctgcagcagcaggctcagatgcacggatgagcggatgttctatgccggtcatcatcaattccggttccggaaatcaggggatgacatgttctcttcctgtgatcgaatatgggaaagaactgggaaagagtgacgaggaaatttatcgtgcactgtgtgtttctaatttggtggcattgaatcagaaacggtatatcggttctctttccgcatattgcggcgcagtgtgtgctgcggcaggtgcgggagcgggaattacctatctctgtggcggaaacctggagcagattgaaaatacggtggtcaacaccattgcagatgcaggcggtattgtatgtgatggtgcaaaaccaagttgtgcagccaaaattgcgacatccctgcaggctgcgatcttaagccataagatggcaatgcgcggtctggtgtttggcagaggagaagggcttgtcatggactgcccggaagatacgatcaaggcggttggatatgtgggacgagccgggatgaaacagaccgatgtggagattttgaatctgatgatcggaaagacgaagatagaagatattgaaaaataagaagagtcagcctcgtgaaaagagaggctgattttttaataaaaagattgaaactttttttgcagacatccggtctaatgagtgtaaagggctataaaatcaggaaagtgaggtgagaggcaatgaagtatctggtaaaacgggcgcagaaaaaagatgatcgggcatttgtggaactgatggagcgctgtaaagaaagtatgtataaagtggcgagaagttatttgaaaaatgatgcggatattgcggatgcgatccaagatacggtgatggattgttatgaacatatcggacgtctgaaaaatgcagactattttaagacatggatgatcagaattttgatcaataactgcaaggatatactggcagcaggaaaaagggtgtatcctctggagaaaattgaggaacaggagaatacatgtatggagatgcagaattatgaatttcaggaactgatgaattctctggatgaaaaataccggacggtacttcttttgtattacggcgaaggattcaagatcaaagaaattgcacagatattggacatggatgagaatacagtgaagacgaggctgtccagaggaagaaagaaatttgagcatgtgtattcgatgagctgaaaaggaggaagtaagatgaagaaagattattctgtagatgagataaaaaaaattatgaatcaggatatggaaattccgaaatccgtagatgagggaatgaaaaaagcatatgaacagcttggaatccaaactgcgagaaggcacagcagaacgtccaggttttgggcaggtctggcagcggcggcgatattgacagcaggattttccattacggcgtttgcagtgacaaagtatctcaatgtaacgagaagtgaggatggggatactttgcagtaccggattgaagtggatacaaaacaaaaagaggcacataagattgaggtagagccgacttacatgccggatgggtatgaatatcaggaagaaggtccgtatggcggaaagtggcataatgaagaaaccagcagtgggatttccatcataccatatcatgcggcagaactttacaagatgtccagagtggatgaagagcctttccggaaattccggaaggaaagccgggtaaagacggcagatacagagaacaccaaactggatctgtttttgatggactcggaatatgtagacagtgagaagaccaataaaatgatatatcttttcaacgaagaggaggggtacggaatttatatccaaagtacgagtgatcttccgctggaagaagttgaaaaagtggcagaagggctgaaggttaccattttggatgagacggtaccatatccttccgaggaagaaatccaggcagaaattgaagataagaaacagtttgaggaaaaaatgcaggcaattgcagaaaggactgttccggcagaaaatgtgcgctcagcaggagaagaaatgaaaaatccgttcagagacgagaaatctgaagatatccggtttacggtcaagggtgtcaaaattcaggagacactgccggttgatcagttcccaaaagaaaattatgttcagtatgaagacgaggttgctttttgggtgaatgaagacacctctctgaaaccgcatgagagatatgtgttcgacgcaggagaaaagattacaatggataccatggcaaacaaagtggcagaaacggtcaattccaggtatgtagtcgtaacaatgcaggtaaaaaatcactctgatttccagacagagtggaatgcagttgacggagtcggcattgcaccggatctggcatacatgaagaccaatgaggacggaagcctgtcaagggcagattatgagctggtgaatgcgaatgaaaattatggactgcagtggagagccggaaacggggcatctttcccgatttattttgacaagatttgctatacagaaggtacgcaggggatgaaacatgcattcttccggcctttggaagcgggagaggcattggaatatacgctggtgtatgtggcggatgaggatcagctggattctctatatctggatatatatccgggatattcaagctctgacggagaagtagtcggcccctatgtcaaaataaaataagagtcacagatttctttacagaaaatgggaaaacgcctatactgttaggaaaagaaaaatttaaacagggggtaaagcagatggcggcgtttttaaaagaaattgaaaaattttatggaaccggagaaaagaatcagcaaggtgaggatctgaagacatttttggaacactatgatcctcataaatatgagacaccgagttgtacgacagatgcagtgatcttttccaaaacaggagagcttcaggatgtgaaccagttaaaggtacttctggtgcgaaggagcaatcatccgagcatcgggttttgggcgctgcccggcggatttgccgaaatgcgggagaatctggaagatacagcaaggcgggagttggaggaggagaccggagtaaagaatcttccgttggaacagtttgcggtatatggagattatgacagagatccaagaactcgcgtgatcacaaccgcatatctgtcgcttgtggacgaacaggatatcacggtacgggcaggagatgatgcggcggatgcggcatggtgcagcgtccgtctgaaggaaaaggaatctcatacaggagaagtcaatagaaaagtctggcagcttcatgtgtcaaatgaagagaaggggctggatacctgggcagaagtggaagagacaagcagggaagggctggttcgggagcgaaagtttcaggtgctcacaggcggagagatcgcagtagatcatgcggcgatcgttgtgcaggcaatgggtattctggcaggccgccttgcagaaaaaagataaaagataaaaagaactggtatcagcagaaagaaaaatatctgccgataccagttttttaagattttttctgttttttccggctgctggaaataaatgcgataaatccaagacaagccagtccgatcagcatccaggtgacaaaaatcgtggttccctgtggacggaacatatcataatatcctttcagatagattacaactacaatccatggaaggatatgtgtcatataaaaacggacttttgtcggaaatttcaggccgtttccactgtttgcttcctgaatgaagttgttccatccccagccatttttatgagtgcagaacaggagatatacaacagaaccaagaggaaggatgttgtttgatacaataaaatcttccagatccataatattcgtgcctgccccaagcggctgaaatccagaccagacgctgaatccgaggatacaaggaatgctcaggacggtgatcaggagaatgttgattccaactgattttgcacgtttccatccaaacagatccatccagaaagaaacgatattctcaaacactccgacaatggtagagagtgcggcacagaataagaacaggaagaataaggagccccagattcgtcctccggccatttgtgtaaaaatattcggcagtgtgataaataccagcccgggtcctgcatcaggttctactccgaatgcaaaacaagaagggatgacgatcaatcctgccatcatggcaacacaggtgtccagaagtacaatgctgacagattcacctgccagagagcgcttcttatccaggtagctgccgaaaatagccataccgcccatgccaatactcaatgtaaagaatgcctgactcatagctccgaagatcacatttccaattccattttccatcatacgcttaaaatccggtaccaggaaaaagcgaagtccttcggaagaaccggtcaatgtgacagaacgaatcgtcagaatgaccatgattgccaacagacagagcatggtgatcttcatgattttttccacgcccctttgaaggccgatgctgcagattccaaaagaaatcagaatcacaagtacagtccaaaagaccagagtaggaacagaagaaagcatcccgctgtatttttcggaaacttcggcggcagttacttctgcaaattctccttttgccatgcggaaacaatagtaaagcatccagcctcctaccatggaataaaacatgaccaggagatagtttccggcaattgcagcccatctgacatagtgccatctgctgtttggcggctccagtgcattataagacgtggcgatacttttctgactggcccgtcctacactgaattcgcatacaatgatcggaagtcccagaatgacaaggaaaatcagatagaccagaataaaggctgccccgccgtattttcctgccatgtatggaaacttccagacgttcccgagtccgatggcacacccggcagataccagaataaaaccaaggcgggaaccaaattgttctcgtttcataaaaacctccatcaacatacattattttttacaaaggagtgctctttgtagactttgttagtataccacgttggcgcggcaaagtaaagaaaatgttctgtatgtaccttgtcggaaatgaggatttatgataagataatcggaagaatgtttgtacatgaggaggaatttatggaaaacgaagtagtttcaaaaaatttcattgagcaggaaatagacaaggaccttgcagaaggtgtttatgatcatgtgtgtacccgtttcccaccggagccaaacggatacctgcatattgggcatgccaaatccattcttttgaattatggactggcaaagaaatataacggaacttttcatatgcgttttgatgataccaatccgaccaaggaaaaagtggaatttgtagattccatcaaagaagatattcagtggctgggagctgattgggaagatcatctttattttgcatccgattattttgagcagatgtatgaatgtgcggtaaaactgattaaaaagggaaaagcctatgtctgcgatctgacaccggaagaaatcagagagtacagaggaacgttgacagagcctggtaagaacagcccgtacagagaacgctccgttgaagaaaatctggagttgtttgaagggatgaaagatggaagattcaaagacggagagaaggtactgcgtgccaaaattgatatggcatctccgaatatcaatatgagagatccgatcatttatcgtgtggctcatatgacgcatcataatacaggggacaagtggtgtatttatccgatgtatgattttgcacatccgatcgaagatgcgatcgagcatatcacacactccatctgtacattggagtttgaagatcatcgtccgctgtatgactgggtagtcagagaatgtgagtttgagatgccgccgagacagattgaattttctaaactgtatttgacgaacgttgtgacaggaaagcgttacattaaaaaactggtagaagaaggtgtggtagacggatgggatgacccgcgtctggtttccatcgcagcgcttcgccgcagaggattcacaccggaatcgatcaagatgtttatcgatatgtgcggagtgtcaaagagtcagagctcagtagactacgcgatgctggaatattgcatccgcgaagatttaaaactgaaaaagcctcgtatgatggcggtgttagatccgattaagctcgtgattgacaattacccggaagaccaggtggaatatctggatgtgatcaacaatctggaaaatgaggaacttggtatgcggaagattccattctgccgggagctttatatcaaccgagatgactttatggaagagcctccgaaaaagtatttccgtcttttcccgggcaatgaagtgcgtctgatgcaggcgtattttgtgacttgtacgggattcgaaaaggatgcagaaggcaacattaccgtcgtacactgtacgtatgatccagagacgaagagcggaagcggatttacaggaagaaaagtcaaaggaacgattcattgggttccggcaccatatgcggtgaaagcagaagttcgtctgtatgagaatctgatcgatgaagaaaagggtgtttacaatgaggatggttctatgaatctgaatccagattctctgactgttttaaaagaatgctatgtagagccgaattttgaagatgccaaagcatatgacagtttccagtttgtaagacaagggtatttctgcatcgatgcgaaagattccagaccggatgcgctggtgtttaaccggatcgtatcattgaagagttctttcaaactgccaaaataaaaatatgaatgaattgactataaatcttcacacaacatcagagacaccattgtatgagcagatttatcagtatataaaaagagagattcaggagggaaggattgccaatggggaaaaacttccctccagtcgttctttgtgcaaatatctggaagtcagcagaagtactgtggagcttgcctatgaacagctggtctcagaaggatatgtggaagcagtgccgtgcaaaggatattttgcagcggaactggatggaatgtatcgtttggatgtggtaccgactcctctgcaaatggaaggacggacacgagaaaaagagtggaaatacgatttcactccaaacggggtggatctgaacagtttcccttataatgtatggcgcaggcttgcaaaagagagtcttctggatgatcgtgcggaaatgttccggctgggagattctcagggggagtatggactgcgccgggcgatcagcagatatttgtatcaggccagaggtgtgaatgcgcatccggatcagatcatcatcggtgcagggaatgattatcttctgatgctgcttgccactgtgatcggacagaaccataaagtggcgctggaaaatccgacatacaaacaggcatatcgattgtttcagagtctttcttatgatgtctgcacagtagatatggatgagaagggcatggaagtaaccggattggaggcatcgggggcagacattgcgtttgtgatgccgtctcaccagtatccgttgggaatcgtaatgcctatgaagcgcaggatggagctgctgaagtgggcggctgcgaaaaaagaacgttatattatcgaagatgattatgacagtgaattccgatataaaggcaagccaatccctgcacttcagggatatgaccgatgggaaaaggtgatctacattggaacattttcaaaatcaatcgcgccctcgatccgcgtcagttacatggttcttccggcacctcttttgcgtgattttcgaaaaaggagcagctttttaagctcaacggtttccagagtggatcagctgatcttacagaagtttattgaggatggacactatgaaagacatctgaatcggatccggaagttatataaaggacgtcatgatacgctgatgggatatttgcggacatttcatgaggtctgtataatatccggagagaatgcgggagtgcatatgctgctgcattttaatggtgatgcgacagaagaagaattgatccaaaaagcgggaaagaaaggagtccgggtatacggactttcacaatattatatagatccgccggccgatctaaagcctacgattttgctgggatatgcaaatctcagtgaagacaggatgaaagaggcaatgaaattgttggaagaagtatggaaataaaaaacaggaactgtttagaaaatgggcagttcctgttttgcgttatgcttctgatggaatatccgttgtatctgtttctttagacggttcttcctttgtatcagctgtatcggatgctgctttgttaagatgtacatatccgcgttctgatactggttttaaatcactgtccagatcaaaatcttcttcttccgtgtcttctgtacaatcatattcggaaactgcatcactgtctttgcagaaataagcgatgatcagaccgattaaagtaccgacagccgcaaggccaagaaaccatttcaaaaattttttcatcgtaaaaatctcctttccagcagatgttatgaatcgatatccattgtaatacttttcacggttaattacaagacctttgactggctgtattgtagagaaatacaaagtgtgttacactggaaacattggaaaggagagaggtgaacacagaagatggaaaataaagccatgaagaaagcgaaaaaagggctgtttagtattgtgtttggccgtactgcactggtctttttgtttattttgatccaactgcttgttttggtgggagtggcgacaattttgaatgactatgcggtttatgtgtatagtggattgacggtactggcagcagtgatcgtaatttatatcattaatgaaagaggaaatccggcatttaatatgacctgggtgctgctgatcctgatttttcctgcatttggctgtttgttttatatttgggtaaaagctcagtttggaacaagatatattggaaagaggctgcgcaggctccggcttgatacagcaaaatatatgcagcaggaaccggatgtgatcgaagcattaagagagagcaaaccggcgaatgcaaatttggcacattatatgcagtatcagttggatttcccaacgtatagaaatacggatatcacgtattttgcatgtggagaagaaaaattcccggttcttttggaggagttgaaaaaggcagagaaatttatttttctggagtattttattgtagaagaaggatatatgtggggatctgtactggagatcttaaaagaaaaggcggccgcaggtgttgaggtgcggttcatgtatgatggaatgtgcagcatttctctgcttccgccggattatccgaaaaagatccggcaatttggaattcaatgcaagatgttcaattcgattcggccgattctttctactacgcagaacaaccgggatcacagaaaaatctgtgtgattgatgggaaagtcggattcacaggcggaatcaatctgggagatgaatatatcaatcaaaaagagcgctttgggtactggaaagatacggctgtcatgatcaagggagatgcggtacagagtctgacgatgttgtttttgcagatgtggaatgtttcggagttaaaaaacgaagaatttgaaccgtatctgacaacgatgtcagagaaagtaaagccagagatgggatttgttcttccgtatggagacagtccttatgaccatgaaaacgtaggggaagaagtgtatgtgcatattttgaatcatgcgaaaaaatatgtacatattatgacgccgtatctgattttggataatggaatgttggatacgctgacaagagctgcgaaaagtggaattgaagtatgcatcatcatgccgcatatcccggataaatggtatgcatttgctgttgcgaagacatattaccgggagctgatcgaagcgggagtcaatatttatgaatttacgccgggatttgtgcatgcgaaggtatttgtatcagacgatgataccgcaacagtcggaaccgtaaatctggattacagaagtttgtaccttcattttgaatgtggggtttttgtatacgataatccggtcgtgcaggaaattgaacaggattttcaggaaacattgaaaaagagttgtaaggttgcagtgtcagacattggaaataccggcatttttatgagaatctgcggaagagtacttcgtctgatcgcgcctttgatgtagaaaaaagaaaaagtgttttacagaatgagaaaagtatagtataattcataaggcagtgattcataagaactgctaattaagagttaaaagcgatgaatacgcaggaggatttgagatggtaaaagcagtagtaggagctaactggggcgatgaaggaaagggcaaaattacagatatgctcggaaaagaagccgatatcattgtccgttttcagggtggagcgaatgcaggacataccattgtaaatgattatggaaaatttgcgctgcacactttgccgtcaggagtattctatgaccatacaacaagcattatcggaaatggtgtggcactggatattccaagactgttcggagaagtacagcagatcgtgaagcagggcgtaccgcagcctaagcttcttgtttctgacagagcgcagatcgtgatgtcttatcacaagaactttgatgcttatgaggaagagcgtcttggcggaaagtcttttggttctacaaaatcaggaattgcgccattttactctgacaaatatgcaaagatcggattccaggtgagcgaattatttgatgacgaactgttgaaagaaaaagtagttcgtgttgcagagcagaagaatgttattctggaacatttgtaccataaaccgttgatcaatcctgacgatttatataaagagctgactgagtacagagatatggtagcaccatttgtttgtgatgtttccctgtatctgcacaatgcgatcaaggaaggaaaagagattcttttagaaggacagcttggttctctgaaagatccagatcatggaatttatccaatggtaacgtcttcttctacattggcagcatacggtgcaatcggagcaggaattccgccatatgagatcaagcagatcattactgtttgtaaagcatactccagtgctgttggagcgggtgcatttgtaagtgagattttcggagaagaagcagatgagttgagacgccgcggcggagatggcggagagtttggtgctacgacagggcgtccgcgtcgtatgggatggttcgactgtgttgcttctaaatatggctgcagaatgcagggtacaacagatgttgcatttacagttctggatgtccttggatatctggatgagattccggtatgtgtaggatatgagatcaatggagaggtgacaacagacttccctgtgacacatcttctggagaaagcaaaaccggttcttaaaacacttcctggatggaaatgtgatatccgtggaatcaagaagtatgaagatctgccggaaaactgcagaaattatatcgaatttattgaagaacagattggatatccgatcacaatggtcagcaacggaccgggaagagaagatattatttatcgcgaaagataaaatgtgaacgaaggtgttccgtgttgtcagcaaaagctggcggcgggacaccttttttgtgccgaaatctgatatcgacaaaacagcttgctgacaatagaaaaaagagttcagaaatttttatgaaaaactttagaaatcctccatatccgggtcacaatttgaaagtatgataaaagtatgccggaggggaagaaaaattctgtaaaacaggaaaaaactggcatattttaaagggcagtatcataaaataataaggctgaggccggaaaaaggaggtattttatgcgtcagaatagtatacagaacagattacagatgatatcgatggaagaatacctggagaaaagacagaaaattcgcgagacagaaagaaaaaaagaacaaaaacccgtctgcgggcagcacgaactggatgctgccgttgcgatggcagagttgtatgtctgataaaagacatcactcattgaaatcagagtcatctttatgagacatgcgggaaaacagagtataaatatataggagtaccggaagcagaatcgtggcggcaatggaggccatcagaagattctgagaagtggatgtatccacaaaagcgaaaatcagtgtgctggcgtaaagaagtatcagcaggatcgctccgatcagtgccatgattcgttttgattttttcataaataaaatcctttctttgatctttctataaatctgccggagcacttttgccccggcagatttattatatacaaaagaaaggatgattgcaatacaggcataaaattagtgtttactgaaaggaaaaagtgttatataataaaaccacgattgaatttctaaaaagaaggagtttttacaatgagtgaaaaatgtttattagatcagtggagagatatggcatatgacagagagctgtcaaaagaacagctggagcagttctggggacattactttagtattgaacgaggtatttatgagcagcttctgacagaaccagatgtagaagtgaaaggtactgtaaaagagctggctgaaaaatatggacaggaagttctgactatggtaggatttctggatgggatcaatgacagtttgaaggtgccaaatccgattgagacaatgacagaagatacagaagtaaatctgatttttgacaaggaactgttatataaaaatatgatcgacgcaaaggcggactggttatatgaactgccacagtggaacgacatttttgatgaagaaaagaaaaaacagttataccgtgaacagaaacagtccggtacgatccgcaaagggaaaaaaattggaagaaatgatccatgtccatgtggaagtggtaaaaaatataaaatgtgctgtggaagaaatgcataatatcaggaaggggagctcttaaaagagtctcccttttctgataaaaagagcaggagatgaagatggagatttatttgatcgtgacaggaatactgtttcttttttactatggtattctttgcttttataccgggaaatgggactctacatttgcaagattttggctcgcggcaggatgtggccatcttctcctggaatttttcgtaaaggcagaatggataagaattcttttgcttatggcagtgacaggcgtgtgggggcttttcctgatcatagaaagtctgatcgtgtatactatgtatagattcccaaataaaaactgcagatatctgatcgtactcggtgcacaggtccggggagataaaattacagattcgttaaagagaagactggatgcagcattattgtatcagcgtgtgcatccgcaggtaaagatcattgtgtccggcgggcagggaaaaggggaagatatttcagaagcctgcgcaatgtcacagtatttgtatgaacatggagcaaaaagagagcggattatcctggaggatcgctcacggacgaccagagaaaatttgcgttttagcaaagcgtatctggacgactcgaaagcggcagtagggattgtaacgaataattttcatctgtttcgggcgcttttgattggtcggagtgaaggatatgagaatctgtccggaatcgcggcgggatgcaaccgaatcttgttgttgaactatatggttcgggagttttttgcggtaatatggatgtggatccagaatcgaaagaagaagtttggttgaaaaaataaaacgtaatgtcagaaaggaatcagaacaatgaagcatcatgcaaatgattacattttgaataacaaagtcccaattccatgcaatgcatttgggacgtatcaggcggcagaaggaaaaagtgcagaggtgatcgggactgcaatccgtgccggatacagacattttgatacggcttccatatatggtacagagagatatgtggcagaagcaattgaaaaaagcgggattccgaggggagagtttttcctgacatcaaaagtatggaaagaagatatgggatatgaacagacgaaagttgcatttgcaaagagtctggaacaactgaatacgtcgtatctggatttgtatctgattcattggccgattccgacgcccgggtacaaagactggaagactctggatctggaaacctggcgtgcaatggaagaactgtatctggaagggaagatacgtgcgatcggtgtgagtaatttccttccgcatcatatagaaaatctgctgcagaactcacagatcactccggcggttgatcagttggaatatcatccgggttatacccagcatgcatcggtagagtattgccaaaaacatggaatcttagtagaggcgtggagtccgatcggacgaaaaagagtatttgaagagtcgttgatcctggagctggcagaaaagtacaaagtgtcgccggcgcagatttgtctgagatttgcattccagaatggagtgctgccattgccgaaatcatcctctctggagcgaatgaaagaaaatcaggacattttctcatttgagatagctgcagaggatatgtatcgtttggagacgatgccgcaggtgggatggtcaggagagcatccggacagagcgagggtttatttttaaaatctgttaaaatagaaaagaaaaattccggcggaaaagtgcgaataattaaaacaaaaaagggaatgatgatactgactttgtaaataaaaggaggaaatatcatgccggaattaaaatgtacggtacagacatgtgtacacaatcaggattttctttgtcgtttggattctattcaggtaggtggaagtcaggcaaaggcttcgaaggaaacctgctgtgacagctttgaagagagaaaaacaagcggaatggaaaattcctatgcaaatgcttatgggaaccatgcaggaacaccttctgataagtgtgggattgactgtaaggcaacagactgcatgtacaatgaacagtgtaaatgcgaagcaggaaaagtcagtgtagaaggctcgtgtgcatgtcataaagacggcacagaatgtgcaacatttcagtgtaaataagaagtaaatgaaaaaagaagcgatatccggatcagaggttcgggatcgcttcttttgaggttgacggtttttatgttacaggggtataatggggatacttgtaaaaccagaagggatgtgatacatatatggaacaaagtgtagaaaaacaagaaaaagaaagcaaaaatggaaacggttattatcattcacagccttcatttggaagcaaaagaacatccagattctggcatcagatcagcagagatgtaagagtatttgtagtcattgcagcctgtatcgtattttattttgcgctgcttcgcatgacgaatatttcagaagtgtttgggaagatctatcaggttctaaaaccgattatttatggtctggtcattgcatatctgctcaatccaattgtaaagctggtagattcatactttgcaccctggctggagcagaagtttccaaagcttaaaaatgcccgcagtatttccagaggaactggaatcctgttggcgatcattgtcatgtttgcgctgattgtggcactgtgcaatatgatgatcccggaactttaccgaagcattcgggatatgatccttacagtcccaagccagttgaatttgtttatcggaaagatgacagagatgatgagcgcggatcagtcaaccattggacaaatggcagagactgtcctgaaagaagccagtgatgcactgcagaactggatgcgtacggatctgttgaatcagatcaatgtgctgatgtcaaatctgacagttggagtgatcaattttgtcaaagaactgttttatgtattgattggagtgatcgtgtcagtttatgttctgttcagtaaggagaagtttgcaaaccagagcaaaaaacttgtatatgcgatcatgcgtccgtcaagagcgaacatggtccttcatctgacgatcaaaagtaatgagatttttggtggttttattatcgggaagatcatcgattcagcaattataggggtgctgtgttttatcggactttcccttctggatatgccttatacaatgcttgtaagtgtgatcgtgggagtgacgaatgtgattccgttttttggcccctatatcggagcgattccaagtgctattctgatccttttgtcagatccgaagatgggaatctactttattatttttgtgttccttctgcagcagttggacggaaacattatcggaccaaagattttgggagattccacgggattgtctgcattctgggtagtgttttctattttattcggaggcggtatgtttggatttgtaggaatgatccttggagtgcctacgtttgctgttatttattatattgtaaagatgctggtgaaccatcagttggagaaacatatgctccctacagataccggtgcttatgatcagatgagctatatcaataatgagggaaagtatataagaattgatgaggagacagaaaagaaagaagaaaaaggggaataggttatgccaatacgtgtacagaatgatcttccggtaaaagagatactggagcatgaaaatatatttgtaatggatgaatatcgggcggcgcatcaggatatccggccgattaaaattgggcttttgaatctgatgccgttaaaggaagatacagaattgcagattttgcggtctctttcgaatacgccgcttcaggtagatgttgtgtttgtgcgtgtgtccgggcatgtgtcgaaaaacacatccaccagtcatttgaataagttttatcagtcttttgaggagataaaagatcagaaatttgatggatttattattaccggagcgccggtggaacagattccgtttgaagaggtggattactgggaggagttggaggagatcatggaatggacaaagaaccatgtgacctctacgctgcacttgtgctggggagcacaggcggggctttattatcattatggaatcgataaggtgcagcttccaaagaaaatgtttggcgtatttaagcatcatgtgagaaaccggagaattccacttgtgcgaggatttgacgatgtgttttatgcacctcattcccgtcataccgagattccgatggagaaggtagagacagatgcacggctgacaatattggcagattccaaggaagcaggactgtttctctgcatggcacaagaaggccggcagatttttgtgatgggacatccggaatatgacaggatgacattggatacagagtataaacgggatttgagcaaagggcttgagattgaaatgccggtgaattattatcccgatgatgatccgagtcaaaaaccggaattaatctggagatctcatgcaaataatatttatacaaactggttgaattattatgtgtatcagacaacaccgtatgatttggagggaacgccgttttaaaggatgtacagagaggaattgagagaatgaaaaggaaaaatgtgcgggggacttgtgctttgttatgtaccatttttttggcatgtctgtttccggcagaaacagtacaggcgcagagggcgctggatgtggcaagagagaaagggtatcagttggaagaacggtaccagccggctgcatcgattattacagagatcaataccgggcagattttatggcaggaaaatgcacagaaacaatggccgcctgcaagcatgaccaaattgatgacgattcttttggcgtatgaagaaatcaacgcaggaaatctgagtttagacagtgtgacagaagtgaatcaaaaatatgcagagattgcagggagatatgctctgagcaacaataagatgcagttgggggcttcctacacagttgcagaactgatggatctgatcatcgtaccgtcttctgcagcagctacctatatgctcgcagatatggtggatccggatccggataaatttgttgagcggatgaatcagaaggcacaggaactgggaatgagcaatacaaaatattttaattgtgttggcgttaccaacaatcttctgcagccctatcagccgttaaaacagccgttgaatggagataatcttacaacaccggaagattatgcgttgttgtgtacatatctggtgaacacgtatccggatattctgaatcatacaaaatatccggagattaccgtaaaagcaggtacaccatatgaggaacattttacatcttatcagatttcgctggagggagcgaagtatgctctggaaggtacggatggcctgaaaacaggatccagcgatacagctggttttaactattcgtccactgccaaacgcggagatacccgtttggttgagattgtgatgggcgtgtctgagtggtctgatcagagtggagaggaaatccgccatttggttgggaatgcgatcatggagcaggcgtttgagcagtttgagtataagaaggtgctttccaaaggagtccacaccattgatggaaaacaggtagaagtgtccgaagatctgtgggattgtgtgccgaaagggaaagaggtgccgcttatcattcaagaggataaagttatggcagatttggagagaaagtatctgccgggatttaaggcgcctgcagttgcctgcaaacaagtagtggcatcagaaaaaaaggaacaaaaaggtcttccgctgtttttgaagatcttgtttgctctggctgcagtttttgtaatgctggtaggagcaagaatcgcttatgtggcgtatcgcagaaaacagagaagaaaacgccgggaagcccagagaagaaggcgtgcaaaaagaagaagagaattagaggaaaagtaatacagggaggaaacagcaatggaagagatacagttttcagcaatggtaaatcagttccaaccgggaatctttactgcgttgaatgaaaaaaaagaagagatgatcaaagcaggaaggcgcgtgtttaatctgtcggttggaacaccggattttgcaccggctcctcatgtgatgacagttctttcggaagcatgtaaagatccggaaaattacaaatatgcactggcagatcgtccggaacttttggaggcagtacagtatcggtatgcacatcggtttggtgtgcagctggaaacagatgagattatgtcagtctatggttctcaggaaggaatggcgcatattggaatggcgttgtgtgatccgggggatacgatcctggttccgaatccggggtatccgttgtttgagatgagtggaatcatggcaggagccaagacagagtattacgagatccgggaggaaaacggatatctgccggatttggagcatattccgcaagatgtgcttgaaaaagcgaagtatatggttgtttcctatccactcaatccagtctgtgtctgtgctccggattccttttataaagagctgatcgcatttgccaggaaacatcagattgtgatcatccatgataatgcatattcagatattatttttacaaggaaacaggggagatcatttttatcttttgaaggtgcaaaagaggtcggtgtggaattttattcgttgtctaaatcttataatctgaccggagcaaggatttcttttgtagtagggaataagtcaattgttgagaagtttaagattctccgttcccagattgattatgggatttttctgccgatccagaaagctgcgattgccgcacttacaggaccggatgattttatcgaacaacagagacaagattatgcagccagaaatcatgccttatgcagtggattgcgaaaaatcggatggaatgtgccggatagccagggaaccatgttcgtatgggcaaagattccaaaaggatatgcttcctctttcgatttttgtatgcagctggtagaaaaaacagggcttttggtgacaccgggaagtgcatttggaagtgcgggagaaggatatatccggatggctctggtagcagatcttccggtgattgaagagatactgaaagtactggatgagtcaggaatgtttttggaataaaagggaggaagcggagatggactatcaaagtgtcatagaacatgcgagaacctgcatcggtccgtattgcaaagcatgttgtgtctgtaatggaaaagcatgtaggaatacgatgccgggaccaggcgcaaaaggagttggagatgtagcggtccgtaattttcagaagtggcaggaaatccgtatcaacatggatacgatctgtgagaagagaacggtagatacggaagttacattgttcggaagaacatttgcctatccgttttttgcaggtcccgtaggtgctgtgaagctgcattatggcgagaaatatacagaccaggaatataatgagattttgttgtcaggatgtatggaaggaggaatcgcagcatttaccggagatggaacggatgcaaaagtcatggaagaagcgacagcagccgtcagaaaattgggaggtcttgggattccaacagtaaaaccatgggatatggacacaatccgaaagaaaatggaacttgtaaaacaatcgggggcatttgctgttgccatggatattgatgcagcaggacttccttttctccagaatttgaatccgccggccggaagtaaatctgtggaagaattgaaagaaattgtgaaaattgccgaaattccatttatcctgaaaggaattatgacagtgaaaggtgcaaaaaaggctttggaagccggtgcacaggcgattgtagtgtcaaatcacgggggaagagtacttgatcaatgtccggcaacagcagaggtattgccggggattgtgcaggcagtaggcggacagatgaaggtttttgtggatggtggaattcggacgggaacagatgtctttaaggcactggcgatgggggcagacgcagcgctgatcgcccgtccatttgtgactgcagcatatggtgccgaagcagagggtgtgcggacttatgttggcagaacaggggcagaattaaaagatacgatgtcgatgtgtggagcgttttctgtcaaggaaattacagcggaaatgctctggtaaaagagtatctttttgtgaaagtttccgtattgactctggatactcaaagtgataacatattcgttactggcacatgatataggttatcctatgtgatgggaacacaaaatatagataaagcaagagcgaagggagcagaagttgtatgatcagagtcatcaagaaagacgggacaaaagaagattttaatgtgcagaaagttgttgtggctgtcaataaatccgcgtaccgtgcacttattaagtttaccgatgaggagctggattatatctgtcgtttcgtagaagaaaaggtacagacattgggaattcaggatgttccaatcgcggagatgcataatgtggtggagggtgccctggaaaaggtcaacccggttgtggcaaaaagctatcgtgattatcggaattacaagcaggattttgtacagatgctggatgaagtatataaaaagagccagtccatcatgtatattggggataaagagaacagtaacacagacagtgcactggtatcgacaaagcgcagcctgatttttaatgaactcaacaaagagctttataaaaaattcttcctgacggtagaggaaattcaggcaattcgagagggatacatttacattcatgatatgtctgcaagaagagataccatgaattgttgtttgtttgacgtaaaaaatgtactgagtggtggttttgagatgggaaatctctggtataatgaaccaaagacactcgatactgcatttgatgtgatcggagatattgtgttaagtgcagcaagtcagcagtacggtggattcacagtaccgagtgtggatgagattctggaaccatatgcagaaaaatcccataagaagctgattgaaaagtacagagggcttggattggatgaagaaactgtgcagaagattgcttggtcagatctggaaaaagagatggaacagggattccagggatgggagtacaagtttaactccgtatcttccagtcgaggagactatccgtttattacagtgacagctggaacgagaacaagtatttacggaaaactggcaacgatcaagatgctggaggtcagaaagaacggccagggaaaagaaggacataaaaagccggtacttttcccgaagattgtatttttgtatgatgagaatctgcatggtccgggaaaaccgttggaggatgtgtttgaagcaggaatcgagtgttccagaaagaccatgtacccggactggttaagcctgacaggggagggctatgttccgagtatctataaaaaatatggcaagatcatcagtccgatgggatgccgtgcatttttgtctccatggtatgagagaggcggaatgaagccggcagatgacaaggatatgccggtatttgtaggaagatttaatattggtgcaatcagtctgcatcttccgatgatctatgcaaaagcacagcaggaaggaaagcctttctttgaagtactggattattacctgaatctgatccgtaagctgcatcagagaacctatgattatttgggcgagatgaaagcatccactaatccattggcatattgcgaaggtggattttacggtggaaatctggggctgtatgataaaatcaaaccattgttaaaatcagccacagcatcctttggaattacagcactaaatgagctgcagcagcttcacaacaagaagtctcttgcagaggatggtgcatttgcagtggaaacactggaatatatcaacaaacgtgttgaagagtttaagaatgaagacggacatctgtatgcgatttatgggacacctgcagagaatctgtgtggtgttcaggtacagcagttccggaaaaaatatggaattatcgaaaatgtatccgatcgagagtatgtaagcaacagtttccactgccatgtaacggaagatattacaccgattgaaaaacaagatctggaaggaagattctggaatctgagcaatggtggaaaaattcagtatgtaaaatatccgatcagctacaatgtagatgcaattaagtcccttgtgagacgtgcgatggcaaaaggatattatgagggtgtgaatttgtctctgtcctattgtgatgactgtggtcacgaagaactggatatggatgtatgtccggtatgcggaagtaccaatcttaccaagattgagcgaatgaatgggtacctttcttattccagagtcaaaggggatacccgattaaatgacgcaaagatggcagaaattgcagaaaggaagagtatgtaacatgcagtatcacaatattacaaaagacgatatgctaaatggagacggactgcgggtagtattgtgggttgcagggtgtgctcacggatgtaaagaatgtcaaaaccctgtaacctgggatcccaatggtggccttttgtttgatgaaagcgcaaaggcagagttgtttgaacagttggaaaagagctatatcagcgggatcacatatagcggaggggaccctttgtatgtaggaaaccgcacagcgatcacagaacttgcaaaagagattcgtgaaagatttcctgacaagacacagtggctgtatacgggatatgagtggagtgaaattcaaaatgaggagatcatttcgtatctggatgtagttgtggatgggaagtttgaaattgaaaagaaagatacgaagctgcattggaaaggcagtgcaaatcagaaagtgattgatgttcaggacagtctgaagacaggaaagattgtattgcatgatgcataaaatcgaacagaaaaggaagagatgatgaaaagaattgcaaaatttcacaaagtaagtctggaacagtttaaaaaggactggatcgacacgttcggactggatgaagagatcaatatcgaacagatttatgcgaatattaaattaccgaggagagccacagccggttcggcaggatatgatttctttgcgcctgtaaggctgatcttagagccgggagcgacattgaaaatcccaacggggattcgtgtggaaatggatccggaatgggtgctgaagtgttatccgagaagtggattgggctttaaatatcgcctgcagctgaataatacggtggggattattgatagcgattatttctattcggataatgagggacatatgttctcgaagattacaaatgacaccaatgaggaaaaaacgattgatattgcacagggtgaaggctttatgcagggaatttttgtagagtatggaattactgtggatgatgatgtgacagatgtaagaaatggtggatttggaagtactaccaaatagaaaattcctaaccttacaaaaatgtaagtaaatttaagaaaaatgtaagaaaatattatggaagaatacagttcaattctatatactggacttggaagttaagaattactttagaaaaagggtggtgcagtatgaaatgggtgaaaagactgtgttctttcatttttttatgtttgctttgtgtcggtgcagtgatgctttggcatggatatggggactgccaggacgcgttggaaaaaatgagtgtacaacaaatggggacacagatacaggagaaggaatcctatatgacattggatcagctgcctgaagaatatattgatgcagtattggcagtggaagacaaacggttttataaacatccggggattgatccgattgcaatctgcagggcattgtatcatgacattcttgctggagcttacgtggaaggcggcagtacaattacgcagcagcttgcgaagaatcagttttttacacaggataaaaaaatcagtcggaaagtagcggagatgtttatggcgtttgaaattgaaaaagtatatgataaagacacgattctggaattgtatttgaactccatttatttcggaaatggatataattgtgtggcagacgcatgtcgtggctattttggcaaagaaccaattgaaatgaattttgatgaatgcacaatgctggccgggattcccaatgcgccgagtgcatacaatcctctggtcaatcctgagcttgcattgcaaagacaacagcaggtgatcagtaaaatggaaaaagcaggatttctgaataaataaaaaagaaacgggaaatctaaccatagaagatcatccagattgcatgagactgtatttccatgtgatcgggagaaaggacaggcattctatggtaattaaaaatacaaaaaagatcagtggttcatttgtggagaatattacttatatggatcatatacttcctgttgggaaaagttttgatctgatcaaacgggaaattgagattggtgagagaagagcagttctttattttatcgatggttttgtaaaagatgaagcaatgctgaagctgatggattcttttatgagtgtgaccagggacaatatgccggaaaatgcagaactattttcacagaggcatgtgccctatattgaagtggatgtgctgaaagattttgatcaggtactgcgaaatgtgctttccggggtgaccggtctgtttatcgaaggatatgattcctgtattgcgattgatacgaggacgtatcccgccagaagtgtggaagaaccagataaagacaagtcacttcggggatccagagacggatttgtggagacgatcgtatttaatacagcattgatgcgccgtcgtatccgggatgagcatctgatcatggaaatgacagaagccggacagacctctcgcacagatattgcaatctgctacatgtcagatcgggtggacaaggaactgcttgcaaacgtaaaatccaggatagaagatcttcatatcgatgatctgaaaatgaatcagcagacacttgcagaggcaatgtttaaaagaaaatggttcaatccgtttcccaaatttaagtttacagagagaccggataccgcagttgcgtgcattctggaaggaaaagtggtgattctggtggataattcaccatctgcgatgattcttccaacttcaattctggatatgatcgaagaggcaaatgattattattttcctacagtaacaggaatgtatttaaaaatatccaggtttatcattacgattctgacggtttttatgacaccggtatatcttttgtttatgatgaatccttcctggattccgagtatgtttgaattcacagcagtacgggatgtgatcaatgttccgcttgtgctgcagttcctgatcctggaactttgtattgatggtcttcgacttgcagcattgaatacgccgagtatgctcagtacgcctttgagtgtgatcgcaggtctggtgcttggagagtttgcggtgcagtcaggctggtttaattccgaagtgatgctgtatatggcgtttgtggcggtggcaaactatacgcagcccaactttgagatgggatatgcattaaagtttatgcgtttgatgcttctggttttgacggcagttctgaactggattggttttttggttggctgccttctgattttcagttttctggcttttaataagacactctcaggaagaaattatttaaatattaaattaaattaaaggggaggaccggagacgatggcacagagctgtgggatccggtctgtcttgttaaaaaatgggaaaggaatgaaaaaaattttgcgaaatgcaggaaaaaatgatatgattaagaaaattagataacaggaggaatgaaggaaatgcgtgactatataattacagtgaacagtacagtggatatgccgaaggaatggctggcggaacggggcgttccagtgattcctctgaaatatacaatggatggacagacgtatacggatatggaaggactgactgccaaagagttttttgataaacttagagaaggcaagatgtctgtaacttcacaggtgaatccggaagaagcaaaagagatgcttgagccaattgtaaaagaaggaaaggatgtgctgcatctgagtttttcatccggacttagcggcactgcaaatagtatgagaatggccgcagaagaattgtcagaagaatacccgggccagaagattgtagcagtagatacgctttgtgcctgtatgggagaggggcttcttttacataaagcactgcagttgaaagcggcaggaaagagtatggaagaagttgtgcagtggatagaagaaaataagctccatatctgtcacgatgtaacagtagacgatcttcaccatctgcatcgtggaggcaggatttccaaggcgacggcagttcttggaagcatggtgcagattaagccgatcatccatatggataatgaaggaaaactgcaggtaattggaaaagaaagaggacgcaaaaagtctttgaataaaatcgttgatatggcagcagagcaggcaagaggatgggagaatgatctgattttgatcacacatggagactgcctggaagatgcagaatatgtagcagggcgtgttcgagaaaaattaggagtggatgatattttgatcaataatattggaactgtcattggaagtcatacaggaccgggcgttgtagctgtattctgtatgggggaaaagcgataaaagagaaatcaaaaacagccaataaaaaatcccgcgtatctgcgggactttttattggctcaaaattacatggtgataataccgagagcattcagaatagaactgattaaaattgcaatcaaaaagattggagcaatccatttgatcataacggtaaacattttcttgctcttgaatgttccgccatcggaagactctacttcgtcaatgatcgtttttggtttgatcacaaatcctacgaaaatacaagtcagtacggcgacgatcggcatcagtacactattgctgatgaagtccatggcatccaggatggacattccaagcggcttgatgaaatccagtgctccaaaaccgagagaagttggaattccgattaacagagagtaaaccgcaaccagaatgcatgtaaactttctggaccatttgaacttatccataaagatagaaacaatggtttccatcaatgagatagaagaggttaccgctgcaaaaaatacaaggacaaaaaatacagttcccagtattgttccaaaaggcatacttgcaaaaacttttggaagagtaataaacatcaatccggcacctgcgttcaatgcagactcatccccgccggagaaaataaatacagatggaacgatcatcaaacctgcaaaaaaagcaaatccggtatcgaaaatttcaatctgacggacagcaccctccagattcgtagatttaggcatataagatccatacgtgatcataattcccatggcaagggacatggaataaaacagctgacccatagcagccagaacagtcatgacagaaaagtgcgacatatttggaagcagatagtattttaaaccttccaatgcaccgtccatggtcagtacataaattgcaattccgactgtcaggattgcaagaacaggcatcattactttgctgactttctcaattcctttttccacgccaaagagcacaacgagagcagttatggcaatgaaaagtgaaaaccagagaattggtgatgcagtgttggcggtaaattcagaaaaatagttgtcaacggaaactgcagcagcaccttcggttataaatgcgaaaaagtattttaaaacccatccgccgattacggaataataagggagaatgatgattggaacgattgcagcaaggactcccagaaatccaaatcgtttatccagtttttgaaacgcaccgatcgcacttaaccccgtcttgcgtccgattgcaatttctgctaccattagtgtgaatccaaatgtgactgctaatataatgtagcagatcaaaaaagaacctccgccatatttggccgccagataagggaatctccagatgttcccaagccctacggctgatccggcagcggctaaaataaagccgatttttccggaaaaattgcttctgtttgttttcatataaaacctcctcaaacctttatcgttagacagaatgcttaaaatagaatgcactctgttatttaaaaggtattatgccatgaatggtgaaaaaaaacaagtcaaatcaatgaattcaagcggaaaagaatgaaagttttgaaaatagagaaaaaaggttgacagaaataaaaatgtatgatagattataacttgcgtaaagcgaaaaacaaagtagagtatccactctcaccatagcacaagcgagtgactattggttcaatattgttacatacagaagtttcctgtatagagtctgtaatgtagtgacattgggtggatatgagattcactctttttttatgcttttgcacagggaaacctaagggaaattcatttgacggaggtatacgaccattagcgatttaatgattaacgagcagatcagagacagagaagtccgtctgattggcgaggatggggaacagttaggaattatgtcatccagagaggcgatgaagcttgccgctgaggcgaatctggatcttgtaaagattgcaccgactgcaaagccgccggtatgcaagattatcgattacggtaaatacaagtatgagcagacaagaaaagaaaaagaagctaagaaaaaacagaaaactgtagaagtaaaagaagtgcgtttatcaccgaatattgatacgaacgacctgaatacgaaggtgaacaatgctaaaaagttcatcggaaaaggaaacaaagtaaaggttaccttgcgtttccgtggaagagaaatggcacacgtacagtcaagcaagcatattttggatgattttgcagcattgcttgaggatgtggcagttgttgaaaaaccggcgaaaatggaaggacgcagcatgagcatggttttaactgaaaaacgttaaaataaaaaatacggacatatgtccatcagggcagtacattaaaggaggaatttatcatgccaaaaattaaaacaaatagagcggcagcaaaacgcttcaaaaaaacaggtacaggaaaactgaaaagaaataaagcttacaagagccatatcttaacaaagaagtctacaaagagaaaaagaaatctcagacaggctacaattactgatgctacaaatgtaaagaacatgaagaaagttttaccatatctgtaagatttgtaaaagtaataagaggaggattaagaaatggcaagaattaaaggcggaatgaacgctaagaagaaacataatagaacattgaaattggcaaaaggatacagaggagcacgttctaaacagtacagagttgcaaaacagtctgtaatgagagctcttacatcttcttatgcaggaagaaaagaacgcaaacgtcagatgagacagctttggattgcacgtatcaatgcagctgcaagaatgaatggactgtcttacagcaaatttatgcacggactgaaggttgcaggcgtagatatgaacagaaagatgcttgcagagcttgcagtaagtgacaaagaaggatttgcaacattagcagagcttgcaaaatctaaacttgcttaattcaagatagattataggagagactggcagttgtcagtctcttattttgtagacgtcgaaatatagaagaaaatttgagtcaattaaaaaacggatagatcattcggtgtgaaatatggcgttggaatttcatcagaaaggtgaaataatatgaattattcaaaaaattagaaaaatttacaaaaatcagttgacaatccagatactctatagtattatacttcttgtagcgcataagagaaatgagctatggtaagcggaagtgtcggaactggcagacgagcaagactaaggatcttgtgatcaatgcgatcgtgtgggttcaagtcccatcttccgcataatgaaaaggagctattgctttaacgatgaatcaatcgtggagcaatagcttttttgttatcacattcattatttacagtgaatcaacagattgttttgcttctgaatagaatatgttgtcaagtcgttattgcctgtctttttgcatgatttatcaatttgcttttatttttttaacccgggggcagtttgttatacaattgctgagttcgctggttgaataagtaatctgatttctatgaaaatgatatcatgtgccggaaaagaggaggatcaaatgaatccaaaaggaattgttgtgtgatctgacagaagagataattgaaaacataaaaaatggaaagcctataaagactttccattttttaactatgcggaagatgggacttgaacccacacgatcgcattgatcacaagatccttagtcttgctcgtctgccagttccgacacttccgcttgcaatgaagtgattctcaaatgaagcacatcacttttagtataatactatagaagaataaaaatgtcaactataaaattaaaaaatatggaatataaaattgacaatttcacaaaacgtgatatactgaataaaacgtttacaagtaaacaaaaaagaggtgtatcgatgagaaaacaaataacagttgagagtatgatttcgttatttatgaaaatcagaaaggtatatgcagatgaatttggaaaaatgcttggacgtgaagcatattctccgaatgaaatctcgattttattgtttttggcaaataatccgtcgattgatacgaacggtcagttgtgcacctgcttaggggtatccaaagcccttgtatgcagaagtgtagatgcattgctgcggaaagggatgatcatcacggttttagatgagcgcgataaacgagtgcagcatttgaaactgacagactgtgcgctgcctgtggttgaacaggtaaaagaaatcaagtgcaggatcgacagagagattctgcagggaatccctcaggaaaacattgtaaatatgacaactacgatggaagagatttttgcaagatttgaaaaacgggcaaatgaaaaggagtaatcggatgaagttaaaaatgtcaaaagaagtagatttgggaaaagagccaataggacgtttattgtttatactggcagtcccgtcgatcatatcacaagtagtcaatgcactttataatatggtagaccggatgtatatcggtcatattccgggagaaggagcagcagcgctgaccggactgggagtttgctttccaatcattatgattgtttcagcatttgcagcactgatgggaatgggcggagcacccagagcaagtattttaatggggaaaaaagacaatgaaggagcagaaaaaattctcggaaactgtttttcagccttggttgtgacagcggtcattctgacagcagtcgttttgttgttcaaacgaccattgctgttgatgtttggagccagtgagaatacgctgcgttatgcagaaagctatttgaatatttacgcagtgggaactatttttgtgcagcttacactggggctgaatgcatttattgcagcacagggattttcaaaaatcagtatgatgacagtcgtgatcggagcagtgacaaacattattctggatcccatttttatttttggtcttcacatgggagtacgtggagctgcactggccacggttctttctcaggcaatcagtgcagtatgggcaattcgctttttgtctggaaaagatacggtgctgagattgaaaaaagaaaattttaaaattcaaaaagagatcatgcttccctgcatcgggttgggggcagcgccatttattatgcagtccacagagagtattcttgttttgtgttttaattcttctttgctgaaatacggtggagatctggcagtgggagctatgacgatcctctccagtgtcatgcagtttgcaatgttgccattgcaggggctgacacaaggcggtcagccgatcatcagctataattttggagcaaataatgcagaacgtgtgaggaaaggattccggctgctgctgatctctgcggtagtttatgcagcatgtatctggggagttgcagaatggattccgggagcttttgtgacgatctttacgaacgatccgcagttggcagagtttgcaagatgggcaatgcgtatttacatggctgcagaggttctgatgggtgcgcagatcgcctgccagcagacatttattgcatttggaaattctaagatttccgcattcctggctatgtttagaaagattattgtgttgattccgttaatctatatccttccaatatttgtggaaaatcatgtacaggctgtatttctggcagagccgattgcggatgtgatcgcggtgactaccactctgattttatttaggaaaaacttcaaaaaagtaattgcaggaatggaacagaaaaaagaagctgtaaaggaagggtaaaagaaaaactgtatggattttatgaaatagaatgtatttcacaagatttgtgcagtttttttgatttcgggataaaaacaaaacagatgggaaaattaaaagagaaagtctcaggagggaaaaatgttagaaaaagttgatttaacgatgaaaatggaaaaagtagaatacaaagcgaagatggagacattaaaaatacagatggggaaactgcagagacagtgtaaagaaatgggaatcccggttatgatcgtatttgaaggatttgacgcagccgggaaaggggtgcagattggaaaattgattcaaagtctggatccgcggggatttgaagtatttacagtaaaagaggagacgcaagaggaggcaatgcatccgtttttgtggagattctggacgaaaacaccacagaaagggagaatggcagtgtatgatggaagttggtgtttcaaagtgcttagcgatcggtttgaaaataagacaaaggaatcagaagtggaaaattgttaccgatcgatctgttcttttgaaaagcagatcacagatgacggaacacttctgattaaattgtttctggacattgacaagaaagaacagaaaaaacgttttgaaaaactgctggtttcaaaggacaccgcatggcgtgtgacaaaagcagatctggaaaaaaataaaaaatatgaacaatatgaagcaatggcagaggagatgcttcagcgaacagacacggaatatgccccttggacgatcatagaagctacagacaggaggtatgcaacggttaagatatacacagtaatcgcacagatgctgacagcaggactggataacaaactgcatgaaattgcgcgggaaaaggcagcagaggtgcttcggaaaacagaacaagaaagaaaaatgcaggaagggcaaaatgagtatgcaaaaggatttggggagtcggtcctttctaaggcagatttaagtttgagatgtgatcagaaaacataccagaagaagctgaaagagtaccagaagaaaatagaacaactgcatggagaactgtaccggaagcggattcctgtagtcatcggatttgagggatgggacgcagccggaaaggggggtgcgatcaagcggctgaccgaaaagatggatgccagagggtatgtagtgaatccaacgtctgcgcccaatgatctggagaagagtcatcattatctttggcggttttggaaatgtatgcccaaagatggtcacatcgcaatttttgacagaacatggtatggaagagttctggtagaaagagtagaagggttttgtacacaagaagagtggaaacgggcgtataaagaaatcaatgacatggaaaaggatctcgctgatgcaggtgcggtcattttaaaattctggatgcagattgataaaaaagaacaggaaaaacgattccggcagcggcaggaaaatccggagaaacaatggaagatcacagaagaagactggagaaaccgtgaaaaatgggaacaatatgaggaggctgttaacgagatgctgatccggacgtctacagagtatgcaccatggatcgtggtggaaggcaatgataaatactatgcccggttaaaagtgctggaaacagttatcgacgcgttggaaaaaagaatttcaaaaaaataaaggaaaaggaagatagatacagaatatatgaagtgtaggggattttaaattctcaaaaatgaagagaaataagaggcagacatgtattattcggaagaagtaatcgaagaagtaagaacaaaaaatgatattgtagatgtgatctccgggtatgtgagactgcagaaaaagggtagctcctattttgggctctgtccatttcacaatgaaaagtccccctctttttccgtgagcagggaaaagcagatgtactattgttttggctgcggagcaggaggaaatgtatttacatttctaatggattatgagaatttttcatttgtggaggcacttaaatttcttgccgacagggcaggtgtggaactcccggagatggagtattccaaagaggcgaaagcaaaagcggacaggaaggcacagcttttggagatcaacaaactggcagcgcagtatttttacgtgcagttaaagtccgaacaggggcaggcggcgtatgcatatctgaccggccggcaattgtcggaggagacgatcaaagcatttggacttggttattccaacaagtacagtgatgatttgttttcttatctcaggagaaagggatatccggaagagctgatccgtcaggctggactgatcaataccgatgaaaagcatggcatctatgataagttctggaatcgggtcatgtttccgatcatggatgtgaacaatcgagtgattggatttggcggacgtgtgatgggagatgcaaaaccgaagtatttgaactcgccggaaacagagatttttgataagagccgcaatctttatggcttgaatcgggcacgagcatcaagaaagccctattttctggtgtgtgagggatatatggatgtgatcgcactgcatcaggcagggttcaccaatgcagtcgcttcgcttggaacggcattgacaacggggcatgcatctctgatcagacggtatgtccaggaagtatatttgacatatgacagcgatgaggcaggaacgagagctgcacttcgggcaattccgattttgaaggaggcgggaattactgcaaaggtgatccggatggatccgtataaggacccggacgaatttatcaaaaatctgggagccaaagagtttgaacgaaggatcggacaggcaagaaacggatttatgttcggactggagatgctggagaaagaatatgacatgaattctccagaaggaaagaccgcatttttccgggaggcagcaaaacggctgattggttttgaggatgaactggagcgaaacaattatattgaagcggttgccggtacatatcatgttactgcagaaagtcttcaaaagctggtcgccaagacagcggtgagtgaagggatggccaggccggtggcacggccgaaacaggctttgggcaatgaaaagccaaaagaagatggggcaaagacttcgcagaagattttactcacttggatgattgaaaacaaaaggctgtttggaatcattcgaaaatatatcagtccggaagattttccggaaccgttgtatcatacggtagcagaatttctgtatcgtcagtatgaggaaggcgaactcaatcccgcaaagatcctgaaccattttacacaggaggaagagcacagagaggcggcttctttgttccatacaaagatccagaagctgacgaccaaagaggaacgggaaaaagcactgcaggaaacaattataaaagtgaagtcacacagtatcgatcaccgcatgatgcatctggaaccgacagatatagtcggacttcagaagctgacgaacgaaaaacgagagctggatgactggaagaaactgcatatttctattgaataaggataaaataaaacaagacagtctgcggttgtgcgcaggcagaggaaggatggacacatggaagaaaacattcagaagtttacggagagactcagagaactggtagcacaggggaaaaagaaaaaaagcattctggagattcaggaaatcaatgatttctttgcggacatggaactggaagcagaacagatggaaaaagtatttgagtatctggaagccaacaatatcgatgtgcttcgcatcagcagcgatgatgatctggacgtagacatggacgtgatcatggcagaagaagcggatgatgtagatatggagaatattgatctgtcggttccggatggtgtcagtatcgaagatccagtcagaatgtacttaaaagagatcggaaaagttccgcttttgagtgcagacagagagattgaactggcacagagaatggaagaaggagacgaggatgcgaaaaaagaactcgcagaagcaaaccttcgtcttgtggtcagcatcgcaaagcgttatgtgggacgcgggatgttgtttttggatttgatccaggaaggaaatctgggattgatcaaggctgtagaaaaatttgactatcacaaagggtataagttcagtacgtatgcaacatggtggattcgtcaggcaattacaagagctatcgcagatcaggcaagaacaatccgtattccggtgcatatggtagagacgatcaacaagctgatccgtgtgtccagacagcttcttcaggaattgggaagagagcctcttccggaagagatcgcaaaagagttggacatgccggtggaacgtgtgcgcgagatcttaaagatttcacaggaaccggtatctttggagacgccgattggtgaggaagaagacagtcatttgggagattttattcaggatgataatgtaccggtaccggcagaggcagcagcacagacattgctgaaagaacagctggatgaggtacttgacacgctgacagaaagagagcagaaggtactgcgtcttcgtttcggaatgaatgacgggcgggcaagaacgctggaggaagtcggaaaggaattcgatgttacccgtgagcgtatccgccagattgaagcaaaagcacttcgtaaattgcgtcatccgagccgcagccgcaagctgagagattatctggactgatgctatgatgaatgaactatcaaagagacttcaggcggtggcagatcttgtaacagaaacagaatgtgtggcagatatcggcacagaccatgcgtatatcccgatttatctggcagaacaaaaaaaagtaaaaaaggcattggcgatggatgtcaatgagggtccgctgatccgggcaaaagagcatgtggaagaagctggtttgcaggaagtgattgaaatgcgccaatcagatggattgaagcagctgcattccggggaggctcaggcggttattattgcaggaatgggcggcggacttgtgatgcggatcctgacggaaggacaggctgtggcagaaacgctgcaggagtgcattttgcagcctcagtctgagatcgcaaaagtgagagagtttctgttagaaaatcagtatcagatcgagcaggaagagatggtactggatgaaggaaagtactatccgatgatgcgtgtgatcccgatgcagggaagtcgaaaagtaaaatgggacgagacacagctgcgttatggaaaactgcttttggaaaagcgccatccggtactgaaacagtatttaaagcgagaacaacgattaaaaacagaaattctggaaaaactaagtcatcagagtggggaacatatcaaaaagcggcaggcggagttagaagaagaacttgtctgtatcaggaaaggactggagtattatgcaatgtaaagatattatggcaatgatagaaggtacatatcccaggagtgcagctctggaatttgacaatgtgggattacaggcgggaagaagtgaaaaggaagttcgcaggatttatcttgcattggacgctacagatgcagtgatcgagcaggctgttgaacaggaggcagacatgcttattacgcaccatccgcttatattttctccgctgaaacatattacagacgaagattttattgggcgcagattgttaaaattgattcgcagtgatatttcttactatgcaatgcatacaaattatgatgtgttgggaatggcagaattatctggaaagattttggggttgacagatacagaagtattgaatgtgacgatgaatacggagacaaaagaagaaggaatcggaagagtggggcttcttccagaagagatgacgttggaagaatgctgtgtttatgtaaagcataaattaaagctgggatctgtgaaagtatttggggatatgaagcagacggtcaaaaaacttgcagtttctcctggatccgggaaaagtgcgattgatccgtcaatcttaaaaaaagcagatgttcttgtgacaggcgacatcggacaccatgaaggactggatgccgccgcacagggagttgcggtcatcgatgcaggacactatggaaccgagtatatttttattgaagatatgaaacatttcctggaagagagacttccggcagccgagatcataacagccccgattgtgcatccgtttcaggtattgtaacatttcagacgggaggagcgtcttatggaaaaagaattttgtaccgttcagattggaaatagaaaaaaacgctacgaaagaggaacttcctacaaaaaaatcgcagaagagttccaagaggaatatccggcaaaaattgtgctggctctgataaacaaaacacgccttcaggagttgaacaaacgtttgaagaaggactgtaatatggagtttgtgacagtgacagatcctatcggttatgagacatatcgaaggagtctttgttttatgcttgtcaaagcagtccatgacgtgggaggacatgagaaaatccgcaatgtgaagatacatttttcggtgagcaatggttattattgtacgatcgatggtgatgtcgttttaaatcagaaatttttagatcagattgatgcaaggatgcatgagcttgcagaagccggaatccccattgaaaaacgttccgtgcacacatcagatgcagtagagctttttggcaggcacgggatgtacgataaagaaagactgtttggataccggagagtttcaaaggtgaatatctaccggatgaatgagtttgaagattattattacggatatatggtgccggattccggttacctgaggaagtttgcgctttacttgtatgatgaagggtttgtgattcagatgcctcttcgaaaggaaccagatgtcattccggattttaaaccgcgggaaaaactgtttcaggtattaaaaagcagtgtacagtggggagatcttcagaatattgagacagttggagctctgaatgatatggtcacaaaatatgatatgcgtgagactgtacttgtacaggaagcatatcaggaacggcagattgcacagattgcggcgcagattgcggcaagaccagagacaaagcttgtgatgatcgcgggcccgtcttcttccggaaagacaacgttttcccatcgattgtccattcagcttcgaacgcaggggatgcggccgcacccgattgcggtggataattactttgtggatcgagaaaagaccccgagggatgaggagggaaactataattttgaatgcctggaggctatagatatcaagcagtttaatacagatatgcaggcgcttcttgcaggggagtccgtatatcttccgattttcgattttaaaaagggaacccgtacgtatgacacaataccgactaaattgggagaacaggatattttggtgattgaaggcattcattgtttgaatccggaactttcccgtcagctttcatcagatcggaaatttaagatttatatcagtgctttgacacagctgaacattgacgaacacaatcggatcccatctacggatggaagactggttcgacggctggtcagagatgccaggacaagaggaacgtgtgcccagaagacacttgccatgtggtcatcggtaagacgaggcgaggaggaaaatatttttccatatcaggaagaggcagatgtaatgtttaattcttctcttttgtatgagctggctgtattgaagcaatacgtggaaccgttgctgtttggagtggaaaaagattcaccggagtatctggaagcaaaaagacttttgaaattttttgattattttatcggaattggaagtgactatgttccggcgaattcattattaagagagtttatcggaggcggctgcttcccggtataggagagaagaaggaaaagacatgggacagaaccgtaaaaaaatcaatgggaaagagcttgtattggatatttcatacgacattgcagggagtgtgttatatgcacttggaatctacacttttgcaaaaaccgcagattttgcaccgggaggactttctggtttggcattgatcatgcatcatttgtggggacttccaattggtatcacaacgcttgccttgaatgttccgctgatcgtgctgagtttcaaactggtaggacgaagatttatgttcaaatcagcaagaactatgattttttgtacgatatttctggaccttatttttccgtatacgaagccttatacaggagaaccgtttatggcagcactgttctctggggtctgtctgggagcggcacttgcgctattttatatgcggggatcgtcttccggaggtacggattttctgaccatgtcaatcaaggcgatcaaaccgcatctttccattggatttgtaacaatggcgattgatcttctgattattttgcttggctggccggtttttgggaatatagatgccgtgctttacggcctgatctctgcatttgtgacatctgtggtgatcgataagattatgtatggtatgggcgcgggcaaattgattttgatcattactacgaaagcagaagcgatgtccagaaagatcgatcagatcagtggaagagggtctacagcaattcgggcaatcggcacgtatacaaaggaagaaaaggatgtgctgctttgtgcctgttccaattctcaggcatattctgttagaatcgtggcacatgaagtggatccggatgcatttgtcatgttgactgagacaagtgaagtatttggagaaggatttattgatacaagagaataagagctggaaaaaggagcatgttctggatgtgattcagaacatgctcctttttgtattatttggattttacttctctccatagttggttgtaaattgcatcatatttgtctccaaggaattggaatgtttcacatccaatcagatcttccggttccgggaaggcaatggcgctgtctcggatggctggatcttcgatcagttctctggctccggtattaggagttgaatatgtaatataatcaaaattcatttttgcaatatccgggcggcagagaaaattgataaatttttctgcattttctttatgttgtgcattttttggaatgacccaggaatcaatccaaagattggatccttcttttggaattacgtactccagatttggattttccatttgtgtatagattgcttctccagaataaatgacaccgatcgcggcttcgtttccgatcattttatcccgtacctggtcaatgacatatgcttgtacaagaggtttctgatcgatcaggagctgttttgcttcttccagttcattcaaatctgtagaattgagtgaagcaccaatatattttaatgccactgcaaatgcatcgcgtacactgtcctgcattagaatattgtctttgtattgttcatcccagagaacagaccaactgtcgattggttcgtctaccatagtcttgttgtacaaaattccaacggttccccagcagtaaggaatggaataaaggttgtccggatcaaactgtctggattgttccagatatgtatttccgatgtatttgagatttgggatgttgtcgaaattgatctttgcaagaagatcattttcaatcatgcgctggatcatataatcagacggacagaccacatcataagcaattgcgccggactgtacctttggatacatgatctcgttggtttcgtattcttcgtagacgacctgaatgccggtttcttcttcaaacattggaatgacatctggatccagatattctccccagttataaacaattacctgattgcttccgccggtgactccgttttgggagccataataaaatccaccgcctgcaatgacaaggatcatagcaatcgggatgacgcgtttgaaaacaatacgactgacattgcgctgctttctgtgtttggcagaagccttttgtgagacttttttattttccggtgtaaagttgatcaaaaacagcaagatcagtacagttacaaacatgatcgtggagagtgcgtacatttccggcttgattccttttcgtacttcgctgtaaattttagtagaaagtgtgtctactccaggccccttcgtaaaatgggtgatcacaaagtcatccagtgacatggtaaatgccagaagaaaaccagagaagattccaggcataatgtcaggcagtacaactttgaaaaaagcgtagatcggagaagcaccaagatccagtgctgcttcgtaagtactctttttcgtctgtttgagttttggcatgacacttaagattacataaggaatgttgaatgtaatatgtgccagcagtactgtggaaaatccgagggtacaccggaatgccacaaacaaaagcatgagggaaattccagttacaatgtctgcgttgagcatggggatgtttgtgatccccatcaccagtgttcgcattttaggtttcattgcctgaattccaagtgcggctgttgttccgatcagtgtggcaatcagcgcagaaacaagtgcaatgatcagggtagtatataaggcattcataatatccggattctggaatagggaaacgtaccattttccagtaaagccaccccatttagcacgtgttttggaattgttaaaggataaaacaaccagtgttacaatcggtgcatatagcaaaataagaatcaggatcagataaattcgtttcgctgtgtttttcatcaaaatgctgttccctccccttctttatcatattttgcgatcatcgccatactggcaatgataaagagcatcagaacaagagaaagaccggatccggtattccagttgctgccttgtttaaattcttgttcgatgacatttccaatgagcaggattttacttcctccaagcagatcagaaatgacaaatgtggtcaatgatggtacaaaaaccatagtaattccgctgataatcccaggcacactcaaaggcaggatgatttttgaaaaagtctgcaaattacttgcacccagatcccgggctgcaaaaatgacatcacggtctatttttgaaagcacattgtaaatgggcagaaccataaagggcaggaaattgtataccataccgaggatgatcgcaaatggcgtattgatcagtgcgagttccggaagatggaaaaaacgcagtaccatattgatgacgccatttttctccaacaggttctgccatgcaagtgtccgcagcaaaaaattcatccacataggaagaataaagatcagaacaataaaactggtctgattcacgtttttttcagataaaatcatggcaagcggatatgcaagtatgaggcagatcaatgtactcacaaaagagaggagcagtgcaagccccagagcttttaaattttcctgagtagtaatctgtgccagattcatcagggtgaaagatccgcttttatctgttaatccataatacaggatcatcagaagtggaatgatgataaaggagacagcccagaacagatatggaccgctcaataattttctactcttcaacgcctaccgcctccgcatcttcagattccggctttttcatgatctggatatcaaatggatccacgtggataccgacttctgtgccaaccgggaacatatccgtactgtggacaaggagttcgtaattatttgcaagaacctccatttcataatgaacgcctttgaaaatcaggtgtgtgaccactccctcgatgattccctcttccggtttgaccagatcgatatcttccggacgaatcacggcatctaccggtttgttacgcccaaaaccgacatcgacacactgccaggtggctcccagcatcttgacgactttgtcttctaccattgtggcagggagaatgttgctgtctccgataaaatcagcaacgaaagcattttggggttcgttgtagatgtcttctggagttccaatctgctgaatatatccctgattcatgacaacgatcgtatcagacatagtcagtgcttcttcctgatcatgcgtaacatagacgaaagtgatccccaattcgtttttcaggcggatcagttcatactgcatatcctgtctgagctttaagtccaatgcacccaaaggctcatccaggagcagaactttcggttcatttacaatggcgcgtgcaatggcgattcgctgctgttgtccgccacttaaagaatctggataccgatctttgaaatcctccagatttacaagttttagtgcgtacttgatcttatcatcaatataatgtttggattttttcttgattttcagaccgaatgcaatgttttctgcaatggtcatatgggtaaagagtgcatatttttggaacacagtattgagctgccgtctgttgggcggcagcttattgatattctttccgtcaaaaataatgtctccggaatccggagtttcgaatcctcccaggatccgaagcagtgttgttttgccgcagccacttggaccgagcagagttaagaattcattttcacggatatagagatttaagtgatccagaatgacattctcgtcaaaagattttgtgacattgacaatatcgattaacttattagacattgttttcctcctggtaaaagtttttaatggaatccagccggctgcacatattgcacagcaaaagatctgccaatgtgagggcagtcatggattcaacaacgaccacagcgcgtgggacaataatcggatcgtgccttcctttgatggaaatttcaatctcttcatggtctgaatttactgtggactgtgtgcgggcaatggacggcgtcggcttcacagcggcacgtacgatcagttcggaaccatcgctgattccaccgagaacacctccggaatggttggtctttttggcaagatgcccggatgcaagggtaaatgcatcgttgttggtgcttccattagcagaagcagccagaaaaccatctccgatttctactgcttttacagcacccatggacatgatgcctttggaaagctgggcgtccagtttgtcaaataccggctcaccgaggccaacgggaagtccggtcacacgacactcaatgattccaccgcaggaatctttctgctccatcatctcgttgagatattcagcagctgtttcggccaatgcattgtttggcatataaaaaggattttctgaaatttcttcaaaatgatattcctgctcgggaactttgacaggtccgattgattttgaaaatgtgaccagtttgattcccagggtttttaaaagtgcagaagcaacagctccggcagcaacacgtccgatggtttcccggccagatgtgcggcctcctccgcgataatcgcgaaaaccatatttgctgctgaatgtgtaatcggcatgtcccggtctataataggaagcaatttctccataatcccgggaacgctgatcctgattgcgtacgagaagggaaatgggcgtcccggttgtcctgccttcaaaaacaccggagagaatttctacctggtcagactcactgcgttttgttgtataacggctttgacccggtcgcctgcgatcgagaaaggcctgtatatcagattcacacaagggaagtcctgccggacagccatcgatgacaactccgattgcggcaccgtgagattccccccatgtagtaatgcgaaataaatttccaaatgatgaaccactcatatgtcaaaatctcctttcttttgcatataaaaccattatataagaagacatattatcatgcaatgcttaattttatttgaaattcttgtatttcttctgtacaatgaaagcgaagcgtaatataatgaggtctagatattggctgaaaggagagcggcactactaaatgaaggaagaaattaaaagaaaaaaacaaaaatccagaaagaaatccgggaaagctgcaggtggatttccaacaagacaggttgggattattgcaggtggtgtagttggagtattggtgcttttatatctgggaatttctgtatttttcatgaatcatttctatataaatacaagaatcaacggaaaaaatttttctggcagatcagcagctgctgtagagtcttatctgaaagaacaggtgaaagattacaaattgacgattcgggaacaaaacagtgagtcggatgtgatcaaaggaagtgatatttcgcttcaatacaaaaagagcgatgcaatcgaaaaggctttgaaaaagcagaatggatttgcatggccggccgccttgttttcccaaaagtcagagaacatatccgtggaagtttcattcgatgagaatgtcctgaatgaaaaaatccagaatctgaaagcagtaaaggcagaacagacgccggcagagaatgcaaaaccggaacttcagggagcgtcttatgtgatcaaagaagaagtgtacggaacggcggttgatgtggatgtattaaataaaaaaatacaccaatatatctctgaatttaagccagaattggatatggaaaaagaaaagtgttatgcacggccgaaatataccaaagattccaaagaagtacaggctgcctgtgatacgatgaatcagtatttgaaagcaagtattacatatacaatgtcagaagcggttgttgtggacaaaacattgatctcttcctggattggcgtggatgataatatgaatgttgtgttcaacaatgaagcgatgaaggcgtggtttacagagtttggtgataaatacgatacagtagggacgacaagaaatctcacgacaccgacaggcagggcaacgacagtgacaggcgggacatatggatggtcgatcgatgaagagacagagcttgtcaacttacagaacagcatcaaaaatggagaagtggtgacaagagaaccagcatattacaatggcggtgccgcaaaatctcatggggagcaggactggggaacgacatttattgaagtggacctgacagctcagcatatgtggtatattaaagatggaagtattgcactggagacagatgtggtgacaggcgtgccaactccggataagatcacaccagaaggggtatatgacattctggatatgaaaagagatgaggtgctgatcggggagaccgatccaagtacaggaaagccgatttatgagacgctggttgcctattggatgcgcgtgacctggacagggattggttttcatgatgcaaactggcagcctgcatttggcgggacacttttccgtgatggggctggatctcatggatgtatcaatatgccggtgagtcaggcggcagcattatatggaatgatcagtgtgggaacaccggttgtgatccactattgatcagaaaagcaggacagaataaaggaaggggcagcgtggatgggcgccgtcccctttttgacgaaaataaaggagaaaaattatgtatgaattactgaaaaaagatggactggcgaaacgtgggcgttttcatacggttcatggaacgattgagacaccggtatttatgaatgtaggaactgctgcagcaatcaaaggggcggtttctacggatgatctgcgaggaatcaaaacgcaggtggagctttccaacacataccatcttcatgtgcgtcctggagatgaggtagtgaaaaaaatgggaggacttcacaaattcatgaattgggataagccgattttgacggattccggtggatttcaggtgttttctctggcagggctgcgcaagatcaaagaggaaggggtacatttccattcgcatattgacggacgcaaaatttttatgggaccagaagaaagtatgcagatccagtctaatttggcgtctaccattgccatggcctttgatgaatgtccgtccagtgtggcagacagggcatatatgcgggattctgtggcgaggacaacacgttggctgaaacggtgtaaagcagagatggaccgactcaataccttgccggatacgatcaacccacgccagatgctgtttggaatcaatcagggtggaatttacgaagatatccgcattgaacatgcaaagcagattgtggatctggatctggatggttatgcagtcggagggcttgcagtgggagaaagccacgaagagatgtaccggattctggatgcggttgttccatatctgccggagcagaaaccgacctatctgatgggggtgggaactccgatcaatattttagaggctgtagacagaggggtcgatttctttgactgtgtttatccgagcagaaacggacgccacgggcatgtatacaccaatcatgggaaactgaatctgttcaatgcaaggtacgaactggacgacagaccgatcgaggaaggatgtcagtgtccggcgtgcagaagttatagcagagcctatatccgtcatctcttaaaagcaaaagagatgttgggaatgcgtttgtgcgtactgcacaatctgtatttttacaatacaatgatggaggaaatccgtgctgcgattgaggcaggagagtatcagtcttataaaaagaaaaaaatagaaggtatgacatcaggaaaatagacacttttcgagaagtttatagaaaatttacttgaagtatgaagtgtttttgtgtacaatggtaatattgtcagacgcagaaaagcgtaagagacaaaatgaagagtatatcacggtaagtggaggtgtgctggtaagatggtaggcgttattctgatttatgtagtattgtttggaggactctggtggtttatgatgcgtcctcagaagaaggagcagaaaagaatccaggcaatgctggcttctatggaagttggagatactgcattgacaacaagcggattttacggtgtgatcatcgacatcacggatgatgatgtgatcgtagagtttggtaacaataaaaactgtcgtattccgatgcagaaagctgcaattgcgcagattgaaaaaccaaacgcagagtaagcaataaagagctgttttatgaccgagaggttgtagagcagctttttttctgtcaatgatcagaagcctgtactatgaaagaagaaaaaatatagagttcactctgttttttgacacttttacgtggtaaagggttgaaatgacgggaaaaatgaggtattatttagagtaacactttggaaattggaaggatgagcattatgaagttgaatatcggaattatcaaaggagacgggatcgggccggagatcgtgacagaagcggtgaaagtgctggatcggattgcagaagtttatggacatgaatgtgagtatacacagcttttaatgggaggggcatcgatcgatgtgtatggaatcccactgacagacgaaacgatccgtcaggcgaaaaagtgtgatgccattttgatggggtccatcggcggggataccagaacttctccgtggtatcagctggagccttcaaaacgtccggaggcggggcttttaaagatacgaaaagagctgaatttgtttgcaaacctcagaccggcagtgctttacgaagagctaaaagaagcttgtcctctgaaagaagaaatcatcaaagatggatttgacttgatgatcatgcgtgagctgacaggcggactttattttggagaacgcagtacaaaagagattgacggagtgatgactgcctgtgatgcgcttacatataatgaagaagaaattcgaagaattgcaaaacggggatttgatatcgcggcaaagcgcaggaaaaaagtaaccagcgtagataaagcaaatgtcctggattcctccagactttggagaaaagttgtggaagaggtggcacaggcgtatccggaagtgaccttggagcatatgctggtagacaactgtgcgatgcagctggtgaaggatccggcacagtttgatgtgattttgacagagaatatgtttggagatattctgtcagatgaggcaagtatggtaacaggatccataggaatgctttcttcagcaagcctcaacgagacaaaattcgggctttacgaaccaagtggaggctcggctccggatattgcgggaaaaggaattgccaatccgatcgcaacaatcctgtcagcggcaatgatgcttcgttttacatttgatcttgatcaagaggcggatgctattgaaaaagctgtacagagcgtgttaagagacggataccgtacgatggatattctgtcagaaggaaacgagcaggtgaatacctgtgagatgggagataagatctgtgagtatattcgatagaccgttaaaaataaaataagaaagaggatgatagagatgagaagtgataccgtaacaaaagggatgcagcaggcaccgcaccgctccctgttcaatgcgctgggaatgacacaggaggaacttgacagaccgctgatcggaattgtcagttcttataatgagatcgtgccagggcatatgaatttggataagattacacaggcagtaaaaatgggggttgcaatggcaggaggaacaccgatcatggttccggcgattgcagtatgcgatgggatcgcaatgggacatatcggaatgaagtattcgcttgtaacaagagatctgatcgcagattctacagaagcattggcgatggcgcatcagtttgacggactggtcatgattccaaattgtgataaaaatgttccgggacttctgatggcagcagcacgcgtgaatattccaacgatttttgtcagtggaggtccgatgctggctggtcatgtcaaaggaagtaaaacgagcctctccagtatgttcgaagcagttggttcttatgcagcaggaaagttttcggaagaagacgtgtgcgaatttgaagaaaaagcatgtccgacatgcggctcctgttccggaatgtatacagcaaacagtatgaactgtctgacagaagcactgggtatgggattgaaaggaaacggaaccattcctgcagtctattctgcaagactgcagcttgcaaaacatgcgggaatgcaggtgatggaactggtaagaaagaacatccgtccaagagatattatgacaaaagaggcgattttaaatgcgctgacagtcgatatggcattgggatgttccacaaatagtatgctgcatattccggccatcgctcatgagatcggaatggactttgagattgattttgcaaatccaatcagcgaaagaacaccaaatctgtgtcatcttgctccggcaggacatacctacatggaagatctcaatgaggccggaggcgtctatgcagtgatgaatgagctgaataaaaaaggcctgcttcatacagaatgtatgactgtgacaggaaaaacattgggagagaatatcgaaggatgtatcaataaaaatccagaggtgatccgcccgatcgaccatccatacagtgagacgggaggactggcagtactcaaaggaaatctggcgccggatggaagtgttgtaaagcgttcagcagtttgtgcagagatgctggtacacgaaggacctgcaagaatttttgagagtgatgaagaagcaacagaggcgatcaaatccggaaagatcaatccgggagatgtcattgtaatccgatatgaaggaccaaaaggaggtccgggaatgcgggagatgctcaatcctacttctgcaattgcaggatatggactgggatcctcagttgcattgatcacggatggacggttcagcggggcatccagaggggcatccatcgggcatgtatcaccggaagcggctgttggaggaccgatcgctcttgtggaagagggagatatcattaagatcaatatacccgagttaaaactggaactggatgtatcagaggaagaactggaaagacgacgtgctgcatggcagccacgagagccaaaagtaaagaccggatatctggcaagatatgcgtctatggttacgtcaggaaatcgaggggcgattctggaaattccaaaaaataattaggaggagagcatcatgcagttaaatggagcagagattgtgatcgaatgtctgaaagaacagggtgtggatactgtttttggatatccgggaggagcaattttaaatgtatacgatgctctgtatgagcatagtaatgaaatcagacatatcctgacctctcatgaacagggggcagcacatgcggcggacggatatgcaagagcaacaggaaaagtgggtgtgtgtcttgcgaccagcggaccaggagcaaccaatctggtgaccgggatcgcaacagcgtatatggattcaattcctgttgtggcgatcacttgtaatgtaggggtttctcttcttggaaaggacagttttcaggaaatagatattgcaggaattactatgccgatcacaaagcataattttattgtcaaagacgtggagaagctggcagaaacgatccgcaaggcattccgaatcgcacgaagcggcagaccggggccggtattgattgatattccaaaggacgtaacggcaaaagtaacagaatatattccaaaagaggtggaactgcctgagagaaagacaaagacgatcacagaggatgcagttgtacgtgcattggagatgatcgaagcttcgaaaaagccgtttatttatgtagggggcggtgccattttatcaggagccagccaggagctgcgggaatttgcagaaaaagcagatgctccggtaacagacacactgatgggaaaaggcgcatttccgggaacggatccgagatatacaggcatgatcggaatgcatggtacgaagacatcgaattatggggtcagtgaatgtgatcttctgattgcaatcggagcgagatttgatgatcgtgtaaccagcgatacagaaaagtttgcaaagaatgcacagattttgcagattgatatcgatccggcggagatgaataaaaatgtcctgatcgatcatgggatcgtaggagatttaaaagaggttttaacaaggttgaatgcaagacttcagccgcagtcgcataaggaatggatggaacagatcgcagcctatcagaaacagtatccgctgcagtatgaagaaggaaaactgacaggtccctatattgtggaagaaatttatcgccagacaaaaggagatgcgatcattacgacagaggttggacagcatcagatgtgggcggcacaatattacaaatacaaagagccgagaacattattatcgtcaggcggacttggaaccatgggatatggacttggggcttctattggagcaaaaatgggatgtccggacaaaacagtggtcaacattgccggagacggatgtttccgcatgaatatgaatgagattgcaacagcggcaagatatcagatcccgatcattcaggttgtggtgaacaaccacgtgcttggaatggtacgtcaatggcagaatttattttatcatcagcattattcacagacgatactgaatgatgcggtagattttgtaaaactggcgcaggcgcttggtgcagaaggaatccgtgtcacaacaaaagaagaatttgcagaagcttttgcaaaagcagttgagatgcagcggccggttgtattagattgtcagatcgatcaagacgataaggtatggccaatggtggcaccgggagcagcaatcagtgaagtatttgatgagatggacttgaacgaagaataagtttcttcgatcagtataaaaacaaaattcaggaggacaagaagatgagtagagtgtacaatttttcagccggaccggcagtgctgccggaagaggtgctaaaagaagcagcagatgaaatgttagattacagaggaaccgggatgtcggttatggaaatgagtcatcgctcgaaagccttcgagacgatcattcaggaagcagaagcggatctgcgagaattgatgaatattccggataactataaagtattgtttttacagggcggagcatctcagcaatttgcaatgattccgatgaatctgatgaaaaatcgggtggcagactacatcgtgaccggacagtgggcgaaaaaagcagcagcagaagcggaaaagtatggaacagttcatcggattgcttcttctgcagatcagacattttcctatattccggattgttccgatcttccgatttcagaagatgcagattatgtgtatatttgtgaaaacaatacaatttacggaactaaatttaaagaattgccgaatacaaaaggaaagacattggttgcagacgtttcttcctgcttcctttctgagcctgtggatgtcacaaaatatggcgtgatctatggtggggtacagaaaaatatcggaccggcaggagtggtgatcgtaattatcagagaagatctgatcacggaagatgtacttccgggaacaccgacgatgcttacatacaagacccatgcggatgcagattctctttacaatacgccgccggcatatggaatttatatttgtggaaaagtattcaaatggttgaagaaaatgggcggtctttctgtgatgaaagagcgaaatgaaaagaaagcaaagctcttgtatgactttttagatgaaagtaagctcttcaaaggaactgtgcagaaaaaagatcgttctttgatgaatgttccatttgtgacaggagaccaggaactggatgccaaatttgtaaaagaagccaaagaagccggattggagaacctcaaaggacatcgtacagtaggcggaatgcgggctagtatttacaatgcaatgccgtatgaaggcgtcgaagcgcttgttgcatttatgaagaaatttgaggaggagaatgcgtaatatgtatcaatatcattgcctgaatccaatctctcagattggactcgataaatttacagagaactatcaaaaaacagaggctgcagaggatgcagacgcaattttggtcagaagtgcatctatgcatgagatagaactgccggagaacctgaaagtcgtggcaagagcaggtgcaggtgtgaacaatattcctctggatcgttgtgcggagaaaggaatcgtagtattcaatacacccggagccaatgcaaatggtgtaaaagagcttgttattgcaggaatgcttctggcagcccgggatatcatagggggcatcaactgggtacaggagtatgaagaagatggtgacatcgccaagattacagaaaagaagaaaaaggcatttgcaggaactgagctggaaggcaaaaaattgggtgtaatcggtctgggagcaatcggagtcctggtggccaatgctgcgacgcatctgggaatggaagtgtatggatatgatccgtatgtatccgtagatgctgcatggaagctttccagaaatatccatcatgcaaaatcagtagatgaactgtataaagagtgcgattatctgaccattcatgttccggctttggaggatacaaaaggcatgatcaataaaaatgccatcagtctgatgaaggatggggtggtgatcctgaattttgcgagagatgtacttgtcaatcaggaagacattgtagatgcacttgtatctgagaaagtacgttgttatgtgacagactttccaacaaaagagattgtgggagtgaaaggcgcgatcgtgattccacatcttggagcttctacagaggaatctgaggataattgcgcaaaaatggcagttgcagaagttatggattaccttgagaacggaaatattacacattccgtaaattatccggactgtgatatgggggtaaaaggaaaaggtgcgagaattacggtattacatcgtaatgtcccgaatatgttggggcagtttactgcacttttagcagcagaaggaatgaatatttctttgatggcaaataagagcaagagcgaatatgcttacacaatgatcgatgtagagtctgaggtttccgaaaagattgaaaaagagttggaggctgtggacggagtactgaaagtaagagtcattgcatagtaaaaaggcagatgtaacaggcaggagtcctgtacatctgcctttttgctgtacaagttaaaataactattgacaatacgtgtataagtgtatacaattatacaagaacttttgttgagtagagtattaaagcttaggcggaggagaaaatcatggaaaatagaaaagtacgtttgaatcagcagacaaatcttctggaactggaagagcatatgtatccacttgtagatgtggagacgccgaatgtgtttcgtaatttgtttcattatgatgaaattccgaagattgcatttaatgatcgtatcgtacctcaccatatgccggatgagatctggatcactgatacgacattccgtgatggacagcagtccagagctccatatacaacagagcagattgtgacgatttatgattattttcatcgtctgggcggtccaaatggtaagatccgtcagagtgagtttttcttatacagtaaaaaagatcgggatgctgtgtataaatgtctggaaagaggatatcagtttccagaagtgacaagctggatccgtgcaagcaaaaaagattttcagctggtcaaagacatcggattgaaagagacaggaattttggtcagctgttcggattatcatattttttataaattgaaaatgacaaggcgagaagccctggagcattatttatctgttgtacgcgaatgtatggaaacaggggttcggccgagatgccatctggaagatatcacacgctctgatatttatggatttgtgatcccgttttgtctggaactgatgaagctgatggaagagtatcagattccggtaaagatccgtgtctgtgataccatgggatatggagtaaactttccgggagcagtgattccacgttcgattccgggaatcatctatggtctgatggcacatgcaggcgttccaagtgaactgattgagttccatgggcataatgatttttacaaagcagtgaataattccacaacagcatggctgtatggggcctgtggagtaaactgttccctgtttggaatcggagaacgtaccgggaatacaccgcttgaagcaatggtatttgaatatgcacagctgagaggaactttggatggaatggatacaaccgtgattacagagctggcagagtattacgaaaaagaaattggatacaaagtaccgtcaagaactccgtttgtcggaaagaattttaacgtgacacgggcaggaatccatgcagacggaatgttgaaaaacgaagagatttataacatctttgatacggacaaatttttgaatcgtccggctttggtttctgtttccaatacatcgggagcggctggaattgcctattggatcaatgcttactataaacttccgcaaggcagtcaggtggacaaaaattctgagctggtcagcaggttaaaagagtgggtagacaaagagtatgaagaaggtcgcgttacggtcttgacagatgacgaattaattgccaaaatagatagtatatgtgacgaattacatataaaattgtagctgggaggctgacagatagaaaatgggcgaatatcaggataattctctgggaagccgggtgtttcagagactccgcgaagacatattaagcggaaaatacaaagagcatgatgaattgcgtgaaaatacactcggaaaagaattgggggtaagccggacaccggtcagagaggcactcagacagctggaattggaaggactggtcacgatcgtaccgaataaaggggcttatgtgacaggaatctcagcaaaagacatccgggatatttatgtcttacgttcgatgctggaggggttatgtgccagatgggcgacagagcatattacggaagagcagctggacgaattagaggaagtgattcttctttcggaattccatatgaaaaaggtgaacggaaacaatgcagaccaggtgacagatctggatggcaagttccataagattttgtatgaggcatcagacagccggattttgagtcatgttctgatggattttcataaatatgtgcagcaggcaagaagaatatctgttgtttcagaagagagagccagaaaatcgattcgggagcacaagcagatcttgcgggcaatcagagacaatgatgctgatttggcagaacagcttgccaatgaacatatcctgcatgttatgcagaatctgaaaaaacagggatacgaagaaatttaggaggatacggaacatggaaaaaattaaaatgaccacaccaatcgtggaaatggatggggatgagatgacaagaattctctggaagatgatcaaagaaaatcttctggaaccttacatcgagctgaatacagagtactatgatctgggtctggagcatagaaacgagacagatgatcaggtgacggtagattctgcaaatgctacaaaaaaatataaagttgccgtgaaatgtgcaacgatcactccgaatgctgcacgtatggaagagtatgatttaaaagaaatgtggaaaagtccgaatggtacaatccgtgcaattttggacggaacggtgttccgggctccgattgttgttaaagggatcgagccttgcgtaaaaaactggaaaaaaccaatcacgattgcgagacacgcatatggagatgtctataaaggatctgaaatgaagattccaggcgctggaaaagtagaacttgtttatacagcagaagacggaacacagaccaaagagcttgttcacgaatttacaggtgcaggtattgtacagggaatgcataatatcaatggatccattgaaagttttgcaagaagctgttttaattatgctctggatacaaaacaggatctctggtttgcaacaaaggatacaatttcgaaaaaatatgaccatacatttaaagatattttccaggaaatctatgatgcagagtatgatgaaaaatttaaagcagcaggaatcgaatatttctatacattgatcgatgacgctgtagcccgtgtgatgaaatcagagggaggatttatctgggcatgtaaaaattatgacggtgatgtgatgagtgatatggtatcctctgcatttggttctcttgcaatgatgacctctgtattagtatctccggaaggctattacgaatatgaagcagcacatggtacagtacagcgccattattacaaacatttaaaaggcgaagagacttctacgaattccgtggcaaccatttttgcatggtctggtgcgctgagaaaacgtggagagctggatggaaacaaagaattgatggaatttgctgacagattggaaaaggctacggttgatacgatcgaagcaggagagatgacaaaggatctggcattaattacaacaatggagaatccgacagtattaaacagcgaagaatttatcaaagcaattgcaaagagactgtaaagacaagtcaggatccagcggattcggacaggatgatggaagtaaccggaagatatgaggaatcttccggttattttgaatttggaagctgaaattcagaaaaaatatttctaaaagtgaatggattatagcttttcaatcgtattataagtgaaaacaggatataaaatttcagataatatggaggaaaaagttatgaaaaagaatatgaaaagagcagtaattggtgttttggcagcaggaatggtgttgattgctggcgcaatgagtgtagctgcagcaggtccgggagcaaacacaggaagaaatcagggtcaaaattttgtggatgctgacagcgatggcatttgtgatcattacagtaagggtaattgtcctcagaatgagatgaaagaaaaggatgctgacaacgattgtgacggaatctgtgataattatggaacaagacagggaagacattttcggggcagatgcggacgataacaggtggcaatgcaatgcggagcgaacaagaggtaaatagggcaatcgaagaatattcgaatatgattcggcggctttgcatgatacatttgaaaagttatgcagataccgaggacatatttcaaacggtgtttttgaagtatgtccttagttctgtttcttttgaaagcaaagaacatgagaaatcctggtttatccgcgttacgatcaatgcctgtaaagatttactcaaaagtttttttcacagtcgagttacatcattggatgaagtattagaaaagactacggaaatgcgggaggatcacagagaagttttagaggcagtattatcacttcccccaaaatatagagaagttgtatatttacactattatgaagggtatacagcggtggaaatcagccagattttagggaaaaaggtaaatacgatttatacgctcctgactcgttccaggcaaatgcttcgagaaaagctgggaggcaacaaatatgaatgaaaaaataaaggaagttttcggacaggtacaggcagaaagtgaattgaaaaacaaaacaaaagattttatttttcaaaaaacaaacgggtataccagggcaagcggtatgaattataaatatgttgtatctgcttttgtatgtttactgttttttatcattagcggacactggatttactttacccctactgtggaaatcagcatagatatcaatccatcgattgagttgggaatcaatcgttttgatcgtgtcgtttcatttgcgagttataatgaggatggtcagaagctgctggattctctggatataaaatttatggattattctgaagcggtaagtcagatcgttgaaaataaagagatcaaagcattgctatcgaacgatgaaattatgacaattacagttgtagaaaaagagaacgaacaatccggggaaattctttctgaaatacaatcctgtatgaaaggaagaacggatatgtattgtgaacacgcgcactcagaagaagttgacgatgcacatgaagtcggcctttcgtatggaaaatataaagcatttttagaactgcaggcattgaaaccggatattacggttgaggaaattgagaagatgacaatgcgtgaaatcagagatttgatgcaggaattgtctgatcatggagaagaagacaggcaatttgaacatgagaaaaaacatcatggacattacggcagacgaggtgaaaagtaaaacgtcctgtaaagagtttacacgaaaatccgtgtgaatactctttacaggacgtttttgtttgtaaaaaggatggattataccaaagcttttttatgttttctgatgtatcttaccaataaaacaatacagataaaatcaattacaactacagcgataatggactgcattccatagtaaattccagcagtttccgcaatttttccaatcacagacggcatgatgatcgctccaagacttgcaagtgtcagaataaaactccatgcaagggagtatttttgaatcaggctgccggcaaaagaaacggttgtcggataaagaccggccatactgaaaccaaagctcataataccaatcagaatccatggtgtagaggaactaaacagaagcaggatgaaaaatcccacaagtccaaagcccatagcaagaagcagccattctttttggaattttgaagacagccatgcagttaaaagtcttccggccagaatcataatccaaagaacgctggcagttacctgagataaagaggccggtaaaagcccagtatccttaaagtaagtgatcatccagccgattacgccctgttcggcacacagataaaagaacattgtcagtgtacagagatagaataatggttctttgaaaaaggcaaatccattggctgtttttttctgtttttctttgacggcatcttccgagactggcacgataaagtacaagatccagcttaaaattcccatgatcagcataaaatagcaggcatagatccagttggatgcatccacttttgtaagtgccagaagcagaagcggaaatgtaaaagcgccaattgcaaacatggcatgaagtccgtttaaaatagaggcttttccgggtgccagttcattaatagatttgttgcagaaattactggtggcacctcttgccattccggtcagaaaaaatgccagagccagcagaaagttgttgtcagagacgataatgaccagataggacagtgcaaaaaaggcattaaataaaagaatactcttttttcttcccagtattgcgggcaaagcgccggagacaaagctggaaatcagatttcctacggaatgaaggctgacgatcattccacaaaacgcgtattccaaaccacgcgtatcgcggatatacggcaacaaagagccaatcgacagtgcaagcataccattgatgatgaaaacaccataattgcacagaagttgtttgttttgtgttttgcttttgaataattgtatcatgttttccctttcctcccagaatacaaaatccaatatagtctaaaacaaaaaagagaatttgtaaagtctatattttttcttttgtacaatttagatatgagttttatacaattcttgaaagccatgttccgataaaataagacaaacgccggaatttttgatgatataagaaagagcggttctgaaggaggaaacagagatgttgtcaatttatgatgcaacttgtagttgcagagaaacaaaatattatttctcgtggaaattgaagggggattgcggacaagcagattatagaatttgtgtaaataacatctggggagaacaggtgtgggatagtgggatcagaaaagactgtaagagacataacattttgtgtgagacagaattaaaaaagggaggaaagtatgaatttaccattacctgtcacaatgtggcaggagaagaggcaagcgtaaaaggagaagctttctatacagagatagagcagtttcaggcattttggatagagccggatcgtaaaagaaaaccattgacagattcgaaagatccgcacgaaaaaaggatagaaacggatccgttagaacgtttggatccaccggtgtattttcggaaaaaatttaaattggatgaactcccgccgcagactttattgtatgcatccgcacatggaatttataaattgtggatcaacgaagaggaagtatcagatctgtttgcaccaggttacacatcttatcataggcggctggagtatcagtgttatgatgtgacggaatacctacggaaaggagaaaatgttctgacagcaatcgtagcggatggatggtataccggaaaaataggtgcggtaggatatggacagcagtatggaacagaaaatgcgtttcttttccaaatggaaggcagggagaaagaaaaaacagtctttacaatttgttccgatgaaagtgtgcgttggacaacgggagcactcagatatgcagatttgtttgtaggaacctattatgatgcagaaaaagaaatcgaagggtttcaacaaccagattttgaagataagaactggatgaaagtaaaatgtccttcttatggatacgatcatttatcgttacagacaattccgccagtaaaagagacacgcagtattactccggaagtatttattagcccggcaggggaattgattcttgatgcaggagaaaatattgtcgggtatgtaagttttgaacttcaattggaaaaaggtgcggttgtatctctggaacacagcgaaacactggataaaacaggaaattttttaaaaaatatcataggacataataaagaccagaaggatttttaccgaagcaaagaagatggggtgcatttttttaagcctccatttacacagcatggttttcggtatgtgcgcgtagaaggaaccagagatagaaatccggatcactatagaattcatgtggtggaaaccccaatgaaagtaacaggtactttcttctgttcggataagaaattaaataaattacaggaaaatattttgagatctcagaaaggaaatatgatctgtattccaacagactgtccacagagagaaaagacaggatggacaggggatgtacaagtttatgcagcgactgcatgttatgagcaggatgtagaaggatttttaaggcactggctggaagatatgagattagaacaactggaagatggacagattccgcacattatcccatatatcccttctcatgattatatgaagccggcgggaattgaaggtgtatccgcagcaggctggtcggatgctgcaattcttctgccatggagattatatgaggcatatggagatcagaaaattttagaagaaaattttgatatgatatgtcggtatatggaatctgtagaggctctggcgtcagaaattcccgcagagttagaaggagaagatcaaaatgtgaaggaaaggcaaaaatatctctggaatacaggatttcaatatggggattggctgatgccgtctatacagatgtcaggccgttctatttttgaagttgtacaagaaacagggcatattgtagcttcgctgatgtatgcgatcacaacagaggttatggaaaaaatctgtcatgtgttgagtgaacaaaagttggaagaaaaatatagacagctgcatcagaagattggagaagcctttcgcgaagaatatatcagagaagatcatacgatcgttaaaaattatcagggagtgtacgtgcttgccctgcaggcacatatattaaatccgatcgaaacacagacagcagttcagcagttggtgaaactgatcagagaaaatgatacgcgtttggatacagggttcttgtcagtcaattacctgctccctgtacttgcagaaaatggagaatcagcgcttgccaatgagttgttgtttcaggacaaatgtccctcctggttatatgaagtgaaaatgggggcaaccacaatgtgggaatactggaatggttatgcagaggacggaactccggatgaagggtctatgaatcattttgcgtttggatgtgtcggagaatatttatatcgcagtattttgggaatatcttataaagagccgggatttcgaacaatccgtattgcaccggactttttctgcgggttggattttgtaaaaggaacttatgacagtatctgggggaatattgaaattttctggaaaaaagagaaaaacttggttcgattagatattgtgattcctccggatgttgaggcagaaattatggtggaagatcagatttatcgatataaatgcggaaaatacagtataacacgggaaattggaaaggagagagaaaaatgaaaccacaattgaaggcgttgatgcagattggaattattgtcagagatctggaaaaggcggtgaaatgctatcaggaaatggggatagaaccctgggatatttcagttatgaataatacggttccgccttttgatgatttgaaatttgatgggaaacagctggaaacaaagggtgatattattaagacagctatgctgcaaggatatggacttgaaattgaactgattgaaccaattgcagaggaaacagcgtattatagatggctggaagaacacggaccgggaatacatcatatcgcatttgatgtaaatgatgagtatgaaacatttttggaaaaaagcagacaattgacaggaaaagaagcgtggatccatggagaaggaattcatggaatgatggatttttcctatgtggatttgagagaacagatgggaatcattgtagaatgttataaaaatattcaatcgggaaagccatatcttatatttgatacaaaaccggaggtagtaaaatgaaagcattgatttattatggaccccaatcagtaaaattggaagaaatacctatgcccataccagggaaaaaagatgttctggtgaaaatcgcaagagcggggatctgtgggtcagatctgacagcatatcggcaggatggactgggcgttggaattttaaaaaaaggacagtttggtcatgatggacagtttggtcatgaaatggtgggcacagtatatgaattaggggaagaagtagaagggatccaggttggagatcgagtgtttatcaatcccacagtatgtaaaaaaagtggaatgctgggatgtgatattgcaggtgcattttctgaatatgtagtcgtagaagaagcaaagtatggctataatttatttcagctttcggatgcatgttcgtttgatgaagctgtgatcattgaaccacttggtgtgggcacacatggaaaaaatagaattgatgtttgtccttctgataaagttatgatttatggggccgggacgatcggattatgtacacttagtgcatgtttggctgcaggatgtcagaaagtagttgtttcagatgtgaatgaacaacgtttgcaaatggttgaaaaaatgggaggaattccgtactcacacgcaaaaaatggaagtctgaagcaatttcttttagaacttcatggtcctgtttatgatacctttggacaggaaaaaacagcaattgatgcatttatcgactgtgcgggagccccgtcggttcttcccgagataattacgcttgcaaaagaaaagtctcgcattgcgatcgttgcagtatataaacgtccggcagaactaaatgcagcagctcttctcagtaacgaaatgacactgaaaggatgctgcggatacgagatgaaagacattatggaggcttttcataatgtgaatcagcatcaaacaaaaatttcagagattgtgacacatcattttaagcaaaaagatgcagaacaggcatttgcgtttgcggcagatgtaaatacgcaggggataaaagtggtcattgattatgagtaatatttgtacaattaaataagaggaaatatacaattttatttatcgagattctattatactgaatacatagataagcttatcaaaaaaagagaggaattcagtgcatgaaaaagaaatttggacgagtgatacatttgggaatcatagtagaagacgtacatacggcggttgatatctatgaaaaacagtttggaatttctccatgggaagtcaaagaacatgcggatttttttaaggacaaaatagtaaatggtcagacagggattgactttgccagtgcaatctatcgaggtgacgattatgaacttgagttgatatcaccttgtgggccaagtgtctatcgtgattggctgaacgaacacggaccgggacttcaccatgtgaaatttgaaacaaatgaaagttatcaagatgtaatttctatgtctaaaacaatttcaggaagagatccgtatattgaaataaaatttcaggatggtacaccaattgtcgcatatgcagatatgcagcaagaaacagggcttcttgttgaaatttcgaattcagaaaacaaaagaataacaggtgaaaaggagcaaaacaatgagtaaagtgaaggaaaagacaagtccaaaattggcatttggatatggaatgggtgaagttgcgaaccagatgagctggtatatgatcaataattacctgacactgttttatacagatgttgtgactcttagtgcaaatgcgatttctctgatcatgctgattgccagagtatgggatgcagtcaatgatccgattatgggaagtatttgtgataagacaaacaccagatgggggaaatttagaccatatctgttcttcgcaccaccatttttggccatttttaacattttgacgtttacggtatggccagtgcagggagttgcaaaggtagtgctctgcctggtaacgtatattggaacagggatgatctatacagtgataggaacagcacatggagcacttgtcaatgtaattgcgattgattctcaggtgcggatgaatctttcgacagcgcgaggaatcggttctgcagtgatcagttttattctttctgcggttgtaacaccaatgattttatttttcagtaaaagtgatacagcaaacggaaaaggatattttggagcttctattgttttatcatgtttgatgattccgtgctttatcattgaagcaatgatctgtaaggagacgtataccgataaacttcacagtgcatctattgaaaacgcacagaaaaatcgaggtttttttgcaaacttaaaagagctttgtaaaaatgatcagctgcttcgtattgtaatttctacattgttcggagcaatttgtgtaacagccagaatgagccttcttacatattatgtaatctatgtagtaggaaattatatgatgatatcagctgttttctctgttatgactgcagcacagtttgtaggaacacttttaattccgtttgcaactaaaaaatttggcaaaaaaaattacatgttgattctcagcggtcttatgatcgcaggatttatcggaattttctttttcggaaaaaatatacctgtactgttggggttatccttcctttgtggactttgtaattcatcaggtgctttaagttatggtatggtatcagactgtattgaatatggagcatggaaattaggaacacgtcaggaaggtcttgcagcatcgtttttgtctcttgcagtgaagatttcaactgcgttttgcggggtggccggtgtacagtgtcttgcgttagttggatatgttccgaatgtagagcagtcagcatcgacgattacagggatcagttttgtcgtaaacatcattcctgcaatttgtggtgtgatttcagtccttccgttattcggatataagcttacagaaaaattcgttggggaaattcgtgcggatttggaagaaagagaaaataaagaagcagaaagtgaaggcgtagctcatgaataattatatttttccttttttatggatgagggagcaggaagaatctgtcttaagaaatgagattaaaaaaatagacgagtgcgggatcaaggcagtctgccttgaatctcgtccccatccggactttggtggtccgggctggtggcacgattttgatattgttttggatgaagcaaagaaaagagatatgcggatatggatcctggatgatgcacattttccgacaggacaggcaaatggaaatattcccaaaaagcatccggaattggcaaggaaatatgttatgatgcaacatacagattgcacagggcctgttgttcaagtttcgttggatgtaaatttgtttatgaaaaaggcttttacatggatggactttggaaaaacagtgaataagcctttgatcgaaaaacaggaattactgagtgtgatggcgtatccggttatagagggggatatccttggagatgagccgttggatttaacagaatatgtgaacgaaaaggggtggcttacaaccgatattccagcaggaacatggagaatctgtgtatcattcgtgacgtatgactttggagcaagaaacgagtatatcaattatattgatgaaaaatctgtaagggttttaatagatgctatttacgaaccgcattatgaacactataaaaaagaatttggaaaaaccattgcaggtttcttttcagatgaaccgggattttacaatgttgatgattttcagatgaacaatgcgattggaagaaagaaaatggcacttccatggagcgatgaactgtattctgtgatagaagaaaaggctgattcaaactggaaacaaaaactgcctcttttgtggatggatacagaagatgcttctatttcagcagaaattagaagagaatatatggatcatgtaagtgcgctttattcaaagaatttttccatacagcttggccagtggtgcgaagatcatcaagtggaatatattggacatgtgatcgaggacaatggggaacatagcagactgggatgtggggcaggacattatttccgtgccatggcaggtcagcatatggctggaattgatacaattggcggacagatcttgccaggaaatccgtatgcttcacggcatggagcggcatatgtttccagtggccgctttaatcattttgggcttgctaagttaggggcatctgcagcacaattggatcctaaaaaaagaggacgtttcatgtgtgaagcctttggagcatatggctggaactttggtgtccgttccatgaaatggctggtggattttcttttggtacaaggagtgaatcattttgtaccgcatgcgttttccatggcagattacccggatagtgattgcccgccacatttttatgcgagaggaaataatccgcaatttccatattttgcagagttgatgagatatacgaatcggatgtgtgaggtgtttaatcagggacaaaatgtaccggtggcgggagtcctttatccggcagaacatgattggatgcatgattgtatgcagattgaagatcttggccaggtgctgcaggaaaatcagatcgattatgaactgattcctgttgatattttgaagaatccaaatgtctatggaacgaagatagaagacggaatgcttgtaatcaatcaaaggaaaatgcagatgtttttgattccggaaacggattatttagatggaaggctggcagattatcttgagacttctgtgcagaaaggcctgaaagctgcctatatcaataagagtccgcagaaagtgttaggaaaagaggggggtgtcgaagaagagaaaaaagttccgcagcttccgatcattacattggaagaacttccaaaagaaatgagaaaacagggaatgtatgaaattctgaccgaaaaaaaagaaaagaatcttttatactatcattataaaaaagaggaagacatttatttcttgtttaacacttctcttagcgaacaaattgatacgaaagtgtttattccagaacatgcgcagctgatttgttgggatgcatggagggacagatatgtttctgttgaacaaacggagtgtgcagaagggaaagtagttcctttgaagttaaatccgtatgaaagcgtcgtccttatgacaaacaacagagaaaaaaaggttgagacagaacgagagatatcggatcaatataaagtattggatatttccgagcactggctggtgagtaaagcaaaaagtttaaagtatccttcattttctgagcatatggagatggaaactttgcggcctgtatcagaagatgatccagaattttcaggaatcatgcgatatgagaaaagtgtgatattatcaaatacaggagaacgtatcgtattttctccacagtacatttatgaagcagcagaagtatttgtgaatggcagatcagcaggaatgcgtattacgccatcttacgagtgggatattacagaattttgtgtttcaggagaaaatcagattgttgtggaagtggccaatacaccgacaagagatactttgaaaaatcctggaatatttgggccaccgagagaaattctagaaccatctggtatgtttggaagtattatgataaaatcatatagaaaaaaataaaaggatgcaagtcaggcaatggtggttgtctgactttgtgcaattacaaaaaggtaagaaatcatgggattgagagatggagcatttgcattatcagagcaagaaaaacattttaaatatcaatatgaacatggaggcagtggttatttaaagaaaccaatgtcttatgcagagtttgaagcacttggagcagaaaaaagacaatattattatgaggcggaaacatatcacgaggcagtcacgaccaatacaccggggaatacaatcaaagaatttgattgtaatggtgatcgtgtagaggtagtgctccatagaagatttagttatccgatcatgcacaaccatgcgtacattgaattagtatatgtccattgtggttcctgtacacattttgttgaaaatcaaatattggagatgaaagcgggagatctgtgtattttagctccggaagccatgcatgcggttgcggtagaaaatgaggataccgttgtgattaacattatgatgagcagacgattatttgatgtgtcctttttgagaattttaaaaggtgggcacatgacatctgattttctggaaaatattttatatcgtaaaagagtcagcccatatcttatctttccaacaggagaagatccgtggatccatgagcttgtattaaaaatttatcgcgagaaaaaggattatttgtataacgaaagcgtaactttatatgtaaagcagatttttattcaactgattcgaaattatgaattgatggcaattatctccgatcctttggacaattctcaggaaacaaacatgatggcgcttatggggtacttaagtgtaaactataatcatgtaacgataaaggaagttgcgcaattttttggatataatgagaattatttaggaaagattctcatgcgttataccggaaaaacattcagtagtcttatttctgaaatccagatggaaaatgccaaacagttgttggaagagaccagtatgagtattactgaggtaagtgaagaagtagggtgctacgattctagccatttcacacgaaaatttaaaaaggcttttggaataacgccgaatgcctttcgcaaaaatcatagataaagaaaatgggaagagcctgcagattactctgcaagcgcttcccatttttcgtacaattcttccaattcagtattgtttgcatctttttctaatgcaagttcctgacatttgaccgagttggaatatacttcttcctgagtcatcagttcgtcaatctccacatttcgttcttccaaaacagaaattcgatcttccgtttttttcagttcattttttcgttttcgttctttcgcctgctgttctttttgctcctgccaactgagtttggaatcggaaggcgcttcttgtgaagtggacaaagcaactggattttcagcagtgatcggagccgcatatgcagcagtcagctcttcttttttctccagatagtagtcatagtttccgatatagttgacaaaggtctggttgaccagttccagaatccgggtggcagtctggttgatgaagtatcggtcatgtgatacatacagaactgtgccggtgtattcgttcagtgcatgttccagaatttctttggaagtaatatccaaatggttggtcggctcatccaggatcagaaagttggcttcggagagcatcagcttggcaagggagacacgtcctttttctccaccgcttaaatctcggatcagtttgtaaacgtcatctccggtaaactgaaaagctgccagcgtatttcgaatctgggtgttggtcagtgcaggataatcatccgaaatttcgtcaaaaattgttttttcattgtgaaggacatggtgttcctgatcgtaatatccaatttggactttcgaaccaagggtaaagcttccggtatcaggttcgataacctgattcaaaatttttaacagtgtggtttttccagttccgttgtcaccaatgactgcgacatgttctccgcgcttaatctcaaaactgatgtcctgaaacaatacctgactgccgaaacgttttccaagagactggatgcttagaacgtcatttccactgatttcggaaggttccagagtgaaatgcatttcttttgctgcttccgcaggtttttccacaggagtaattttggaaagcattttttcccggctttccgcacgtttgatggatttttcccgattaaaggaacgcagcttttcgatgacggcttcctgatgtttgatttcacgctgctgattcaaatattctttcagctgtgcatctcggatcatttgttttttctgtgcatatgctttgtaattgccgtcatacatacgtatcgaagcatgttcaatttcaatgactttggtgacgacacgatttaagaaaaagcggtcatgggaaacgatcagaacggctccgggatagtttaaaaggtaagtttccagccagctgatagagttgagatccaggtggttggtaggctcgtccaacaacagaatatccggtttggtgagcaaaagtttacccagtgatacgcgggtcttttgtccgccggaaagggtgtctgtccgtttggaaaactcctcctctgcaaaaccgaggccttttaaaacaccggtaatttcactttcgtatgcgtatccgtttttggattcgaattcggacatcaatcggttgtaagtgttcagtcggttttccagttcttctccggaaagcaattttagttccagctcaatggagcgaatctgagcttccaaagcaataatatcggattttgctgtttttaattcttcatagatcgtatttgtggtgtccagattttgatgctgggcaagatatccaagagtttttccttttgtcagaatcacatcgccgcgatccaaaggcaattctcctacgatcatcttgaaaatggttgattttccggcgccgtttacaccaacaagggcagctttttcacggtcttctacatgaaaagagccatcccggacaatgagatggtcgccgaatgctttatttaaattatgacatgcgagtatcatgaaattcctcctgtagtttgacaatcactgatttttcaaatcatcaccatttcattataacggaaacacagcaaaatacaaccaaaagttatattttaagcaggaaaagatattcaggaaaaagccttgaaaatcaggcttgtcaatatgtttgagcggcaggggaacacgggatatgaaagtatggttaacgttgaatctttgtggtgggaatgctataatttaatacaaaaatcgagtatctagaaagtaaataatggacacagactttgataatgtttatgaataatggcatcgaatcgatagaaatggaggaaaaaatgtcaaaatatacgaaggtaaggatcatggatgcttttctttgtttgttaaatgaaaaaagcatggatcggttaaccgtaaaggatatcattgagactgcagaagtgaacagaaatacgttttattattattttgaagacatttacgacttactgtcgcagatttttcagatgaaactggacgatttttgcagagatatgaaaacttgtgatacattttacgaagaatatattcgttcggcagaatttttaatgaaaaacaaaaaagcgatgtttcatatttaccattccagagaccgggaattgcttcaagtttatctggaaaagattacagaaagcattgtggagcgatttgtaagaaagaaagcagtttcctatgatattgaagaaaaaggaattgaatatctgacaaaattttatagctatacgatcgttggaagtgcaatgcactggattcgtgacggaatgcctccttatcgtgagcggtatttgtttcttgtttcaaaatcatttgaagattctattgatgatctgatcagatcttatttagccaaccaggtacaataaaaagtaaatcaatacagacaaaaatcaaaaaatgtatgaatttcagatgaagtatgatttttgtctgtatctttttgcgcttttttcggataagataggagcttataaaaaggcaatacaggatgaaaaggagaggttattatgggatttacaaatgaattgaaaaaagcaactttaaaaaaggcatttgactatttagaaaaagatccggaaaaaaatgtgcataaactgatggcattggtggacaagtttgcaggagaaggtccggatagttttccgacgcaaagagcggcatttcgcaatgtgttggcagatcctgaaaataatatgtatcagctgattatgagtgtattccatgatatcgatcgggaagtactcaaagcgacattggaaaatttcttctttaatgccaatattgtagggtggccaaaacaggaagaaaacagaaaaaaatatgactgtaatgtgccatgggcaatacttttagatccgacttctgcatgtaatcttcactgtacagggtgttgggcagcagaatatggaaacaagctgaatttgacgtttgaagaaattgacgaaatcatcatgcagggaaaagaactcggtatttatatgtacatttatacaggtggggagccgctggtcagaaaaaaagatctgatcgctttatgtgaaaagcatcatgattgtcagtttttgagctttacgaatgcaactctgatcgatgaagattttgcggaagaaatgctgcgggtaaaaaattttattccggctatcagcgtagaaggatttgaatctgccacagatggaagaagaggaaacggaacgtatcaaaaagttgtaaaggcaatggagatattaaagaaaaaacatttgccgtttgggatctcatgctgttacaccagtcagaatctggattctatcagttcttttgaatttgtagatcaaatgataaaatggggagcaaaatttgtgtggtattttcattatatgccggtaggaaatgatgctgtgccggaactgcttccaaatccgcagcagagagaatttatgtatcacagaatccggaagatcagaagcacaaagccgatttttgcaatggatttccaaaatgacggtgaatatgtcggtggatgtattgcaggaggaagaagatatttacatattaatgccaatggtgatgtggatccttgtgtatttattcattattccgattcgaatatccgggaaaaaacattattggaatgtctgcagtcacctgtttttaaggcatatcatgatggacagccatttcatgagaatcatctgcgaccatgtccgatgctggaaaatccgcaattgctgagaaaaatcgttcatggaacaaacgcaaagtccacagatctgcaatctccggaaagtgttgatcatctctgtgacaagtgcgtagactatgcgaaacactgggaaccgacagctgagagactgtgggcagacaggcagaaatgaagatagggggataaaagaaacgaagagttctttcactaaaagtttgacttatctttcacaattttatataataagaaaagactaaaattggagggtacaatcagtggaagaaagaaaaatatcccgtgcggtgatcagcagactccccagatattatagataccttggcgatctgatggaggatcaggtagagaggatctcatccaacgacttaagcaaaaagatgcatgttacggcatcccagattcgtcaggatctgaataatttcggaggattcggacaacagggatacgggtataatgtgaaatatttatatacggagatcggcaagattctcgggctggacagaagccataattttattatcataggagcgggcaacctgggacaggcgcttgcgaattatgcttcttttgaaaaaggcggatttattttaaaagggctttttgatgtgaatccacgtttggagggggtttccattcgaggaattccggtacggatgatggacgaactgcaggattttatccagaacaatgaaattgagattgcagcacttacgattccaaaatctaaagcaaaagaagttgcagagttattggtggacaatggaatccaggcaatctggaattttgcacatacagatctgaatctgccaaaagatgtgattgtagagagtgtacatctttctgacagtctgatgaagctgtcatacaatgtcagtcgtcaccgggaagaaaaaaacaagtaagaataactcagttcatgtgcaaagacgtgtggtcggaaaaatctgaccgcacgtcctttcttttcggaaggaggagagcgaatatgagatatttaccgaatggaacatggatgcagaaggccgatgcgcataccatccaaaagataggaattccttcgcttgtgttgatggaacgggcggctttaagaactgtagaagtaatgaaggacaaagaaatttgtctggatcattgtctgatcgtatgcggcagtggaaataacggaggagatggatttgcgattgcaagacttttacatgcagaaggaaaagatgtatgcgtagtttttgcgggaaaagaaacatccatgagtgaagagtgcaggcaacaaagcagaatcgcctcaaatctggggattccggttgtaacaaagattccggaaaaagaatatactgttgttatagatgccatatttggagtgggattgagcagagaaattcaagggcattacagagaactgatcgaatcaatgaaccggattgcggcgaaaaaagtagcagtggatattccatcgggagtcggttcttttgacggtcagattttgggaactgcatttcgggcagacttgacagtttcttttgcatgtgagaaactgggaactgttttgttccccggatatgattatgcgggcgaagttgttcctgtggaaatcggaatcgggacagaactttttcaggacaatttggatgtctgctatacattagaaaaatcggatctttccaagcttcttccggaacggaaaaagaattctcataaagggagttatggaaggattctgatgatcactggcagtaaaggaatgtccggggcatcgtatttgagcgcgcgtgctgcttatatcagcggaggtggactggtgcagatttatacagaggaatcaaaccgggcaattctgcagcagcagctgccggaggcaattgtatccacatatgcagaatatgaagaagagacattgaaaagcctgcttgactgggcggatgtactttgtattggatgtggacttggaaaaagccggacagcagaacagattctttcctatgtgatgaaacatgcacaaattccctgcgtgatcgatgcagatggattgaatcttctggccgaacatatggaacttttagccgaggtggaaacacccgttgtgctgacgccacatatgaaagagatggcaggacttttaaattgtacaatttcggaactgggaaaaaacaggtttttcatgttacaagaatttacaagccgctatcaagttgtatgtgccctgaaagatgcgcgtacattggtggcagaaaaagaccgacagatgtttttaaatactgcaggcaacagtgccatggcaaaagccggatccggagatgtgctggcaggggtgatcaccggacttttggcacagcatatgacagcacatgatgcagcagtttcaggtgtttttcttcatgcctgcggcggagaccaggccagaaaagtaaggggagcttacagcgtcctggcagaagatctgacagagggaattgctgtctgtatcaaagagacaaaaaaagggagataatcatggaaaaacatagtagagtatatgcagagatcgatctggatgcaatttcatataatatggagcagatgaaaaagcgggttggagaaggtgcaaaatttattgccgtagtgaagacggatggatatggacatggagcagtgccgatcgcacagatgctggacagagacccggatgtatggggatatgcgacagcaacactggaagaagctgtggaactgcataaatcaggaattcaaaagcctgcgatcgtgttgggatgtgtgttcccggatcaatatgaagagatgataaaggaagaagtgcgggctacagtgtacacgcagaagatggcaaaagagatttcaaatattgccgaaaaactgggaaaaacagcctattttcatattaagatcgatacagggatggaacggcttggatttccggtatccgaggaaagtgcagatgtgatcaaggagattgagaaatttccgaatgtctgtctggagggaatgtttacgcactttgcaaaagcagatgaactggataaaacattttctgaagaacaatacagaaagtttctttggatgcgggatgcagtagaaaaaagaggggtttcgatttcccggtatcattgtgacaacagcgcaggaatcattgattttccagagtggaagcaagatctggttcgtgccgggattgcgttgtatggaatgtatccgtcagaggaagtgaagaaagaagctgtcgatttaaaacctgcgctgcgtctggtcagtcacgtcagttttgtgaaggatgtagagccaggggtttccatcagttatggcggaacttttactgctgataaaaaaatgagggttgctaccattccggttggatatggagatgggtatgcaagagggctatccaatcgcggagaggttttaatccatggaaaacgtgcgcggatactggggcgtgtttgtatggatcagtttatggtggatgtgacggatattccaaagaccacatttatggatgaggtggttctgattgggaaagatggagaagacgagatcacggtagaggaactcagcgaaatttgcgggcgttttaattatgaatttgtatgctgccttggaaaaaggatcccgcgggtttataaaagcaaagattttatggaaaaataaatgtcaggtgaatacatccgataaaagcggagatactcaagtatactttccggaaggaaagaaaattgaagtataagaatcggagtgtgaataaaacgtgacagtcagaagaggcgatatttattatgcggatttaagtccggtgatcggttccgaacaaggtggtgtgcgtccggtactgatcattcaaaatgatgtgggaaacagacacagtccaacggtcatttgtgcagcgatcacatcgcgaatgaataaggcaaagctgccgactcacattgaaatcagtgcaagaaaatacaggcttgtcaaaaattcagtagtgcttttggaacagatcaggactctggataaaaagaggctgaaagagtatatctgtcatgtagatggacaatttatggaagaagttaatgaagcaattcgcatcagcctggagctgtctacataatggaatcaggctgaaaatgtccgtgttacaactttacagaacgaaaaaagagtgatagaatggaacaacgagtttatgagataaaaggagaattgagcaatgtcaggacattcaaaatttgcaaatattaaacacaaaaaagagaaaaatgatgcagcaaaaggaaaaatctttaccaagatcggaagagaacttgcagttgcagtaaaagaaggcggtggtccggatccggcgaataacagccggctccgtgatgtgatcgcaaaagcaaaagcaaacaatatgccgaatgatacgattgacagaaatattaaaaaagcagcaggggaaggttccggggataattacgagcatatcacatacgagggatatggtccgaacggaactgcgatcattgtaaaaacactgacagacaataagaaccgtacagcatccaatgtcagaaatgcttttacaaaaggaagcggaaatgtaggaactccgggatgtgtctcattcatgtttgatgaaaaggggcagattatcgtcgcaaaagaagagtgtgatatggatgcagatgaactgatgatgatggctttggattttggagcagaagatttctccgaagaagaggagagttttgaaattcttacagctccggaggactttagtgaagtacgtttgaaattagaagaagccggaattgccatggtgaacgcagaggtgacgatgattccacagacgtatgtggaactgaccagtgaagaagatattaaaaatattcagaagacactggatcttctcgatgaagatgatgatgtccaggatgtgtaccacaactgggatgaatagattccatcttacatagattttaaatagtgataacgaaaccatgataaacatatattagaatgacatcagaagttgttgatcaatggtttggagggatcgctatggtaaaagaaagaagaagtgcaaaaaggatcaaatatgatatggtccgcgtgtactctaaaatggaaacgaatgtagataggaaagcaaaaagcatttttaaaagaaaaccgtatgcttcggcaaaataggaagagagaacaggtctgttgatatttggaatatccgacagacctgtttctttgtgcaaaaaaattgaaatgccgtatcagatatgctatactaaacaacggtataaaaggaaatacagcaaaaagaggaatgccaatgtgtcagaataacttacagaatgatttgattgttttatatgaaaataccagaaaaaaagtacagggatttcagaaaaaaacatatcagtcggatatgaaaattttagaaacagaaaatcagacattgctggaatgtgtaagagagcgaatcgaaagatcagaagaatgtatgcgggaagtagccgggtacattccggaatatgtatcagggatactttctcaagtggattccaggcgaaaaaggaaaacagtggtgatcgatcacaatatggccatggtagctttttttgttccgttgatgggaaagattccaagtacgcagacaaagaaatttacggaaacgatagtcgagttatggaatcagagaatgcctggcagtaaaatcggacattccgatgcagacagcatagagaatggatttaagaaaggaattttctgttacattacaacggctgtctgcaagagtcttgagaagccggatgattgttacgaactgaatcttttgagaacatatagagatcagtatctgatggggacgaaagaaggcgagattcttgtaaaagaatactacaatattgcccctacaattgtgaagcggattgatcgttgtccggatgcggcagagatttatgcggatatctgggaaaagtacttgaaaccgtgtgtacgtttgatcgaatcaggtgcacaagaagaatgcagagaattatacacaaagatggttcgttctctggaacagaaatatttatatgcagtaggaggagaaaaaaatgagtaattataagacagagacaaaatgtatacagtccggatatgaaccgggcaatggagaagcaagagttcttcctatttaccagagtacaacatttcgatatacaagcagtgaacagatggggcgcctgtttgatctggaagagtccggatatttttacacccggcttcagaatccgaccaatgatgcagttgctgcaaaaatctgtgatctggaaggcggagtagcagcaatgctcacatcatccggacaggcggcgaatttttatgcgattatgaatattgtagaagcaggagatcatattgtttgtgcatctgcgttgtatggcggaacctataatctgtatgcgcatacgatcaaaaaaatgggagtggaagctacatttgtagatccggagtgtacaccggaagaattggaagccgcatttcaggagaatacaaaagctgtttttggagaaacgatcgccaatccggcacttgtagttctggatctggaaaaatttgccaatgccgcgcatgcacatggagttccatttatcgtagataatacatttgcaactccgatcaattgccgcccgtttgaatggggtgcggatattgtgacacattccacgacgaaatatatggatggacatgccacttgtgtaggtggtgcaatcgtggacagtggaaattttgactgggatgcacagaaagaaaagttcccgggactgacaacgccagatgagacttatcacggagttgtatatacagagcggtttggcaaaggggcctatattacaaaggcaaccgcacagctgatgcgagatctgggatcgatccagtcacctcagaacgcattccttttgaatattggtctggagactcttcatttaagggtgccgcgccattgtgagaatgcagtgaaggtagcagagtatttgaaaaatcatgagaaagtggcatgggtttgctgcccgtcccttccgggagacaaatactatgaggttgcacagaaatatatgccaaatggtacttgtggtgtgatcacgtttggattaaaaggtggcagagaagcggctgttgagatgatggacaagttgaaaatggtggcaatcgtaacacatgtggcagatgccagaagttgtgttcttcatcctgcgagtcatacgcatcgtcagatgaacgataaagaattgatggaagcaggagttcagccggatctgatccgctttagcgtaggaattgaaaatatagaagatattattgcagatgtggagcaggcgcttcgctaaataaaaatggtatggatgtatacaaaaggcatccataccatttttgcataaaatcctcatttttcgtataaatcaagacggcagatcgaatactaaagtatccggctgtccaagaacaggcctgaaaatagaaaaaagaaggtagagaatcatggaaaatgaggaaaagcaaaaacaacgtcttgataaaaatgaagagattaaagagaccggcaccttaaatttgaatggaaacgggcaaaaagccaatattcagcttctgacgatcatcggagagattgaaggtcatgaagcggtttcgggaaatacaaaggcaacgaagtatgagcatttgattccaaggctggctgaagtggaagatgatgatgcagtagatggagttctgattttgctcaatacactgggaggggatgtagaagcggggctggcaattgcggaaatgatcgcatcattaagcaaaccaacagtttcgttggttttaggcgggagtcattcgatcggtggtccgctcgctgtttctgcagattattcctttatcgttccaagcgggacgatgatcgttcatccggtcagatcttccggaatgttcatcggcgtgatccagagctatcgcaatatggaaaaaacacaggataggattacccgttttattgcatctcattcccggattacgcaagcacgtctggaagagctgatgctggattccacacaacttgtaaaggatgtaggaactatgctggaaggagaagatgcagtcagagaaggcatcattgatgaggttggaggaatcagtacggcactgaaaaagctgcgtgaaatgatccgggagaaaaaatgttaatgacacacttttcaattgatgctatactagatgtagtatgtgtaattatcaagggggaagtattatggctgcaaagtcaacaaggaaaaagaaaactacaagaaaaaagtcatcgaaaaatcaggcaagtacatccctgaatagtgagattttcattctggttctatttgcggtttgtgtattgatgcttctgagcaattttggagtgattggaattgcgggggatgcagtatcctcagtactttttgggctttttggagtgatggcatatattttgccgtttcttttatttggcgtggttgcttttgggatttccaacaagggaaatccacacgcctacataaaaatcgctgcatgcgcagctctggtgtttgctgtctgtgcattctgtcagctgctgatgcagccctttgatgcaaaagacagtctgtggacctattatcaatatgccagtgattaccgaaaggcaggaggtctgaccggaggctgtcttgtgaagatactctgtcctttcatcggagtcgtaggaacctatgtggttttagctgtcctgatggttatcagtgtgattttgattacagaaaaatcgttgcttgtcccacttgggaaggggagcaaaaaggcatatgcagatgtgaaacgccgtcagggagaggcttctgccagacgtgcaaaacacagagaagaaaagcaaaagcaattagaagcggaaaaagccggtcagacagattcttccagaagaagtgaccataaggtgtcaggcgtttcttttgcgacaacgctgcaggcacaggaggaagctcccaaagaaactgcacccaaaaagcgtaagaaaaagctggccgggaaagggccggatctgcgggaactgacggtttcaccggagcctgatttgtcagaaacactgccatctccgtttgaggattttgtaatcaaccgcgcagaaggtgagccggaagaaacggggatggaagagccgcctttctgggaaaatgagcaggaacctgccgcagaaaatatcccgaaggaaagtatttcagatggaattgcccgcacaagaaagaagacaaaatccagtgctgcagatgtagaggctcaggctgttcaggtagaacaaaaaatcagagaacaggaacagcaaccgaagaaagtatataaaattccgccaatgactttactgacaagaggaaaaaagggcggaggtgattcggatgcccagctgcgtgctacagcgcagaaactggaacagaccctgcaaaatttcggcgttcgggttcatgtgaccaatgcaagttgcggtccatctgttacacgatatgagctgcagccggagcagggggtcaaagtcagtaagattgtagggctggcggatgatatcaaattaaatctggcagcagcggatattcggatcgaggcgccgattccaggaaaagcagcggtgggaattgaagttcccaaccaggagaatacagcagtgatgctccgggatcttctggaatctggagagtttaaaaattctactgccaatatcccatttgctgtgggaaaagatatttcaggaaaaaccgtgatcgcagatattgcaaagatgccacatttgttggtggcgggagcgacaggttctggaaagtccgtctgcatcaatactttgatcatgagtattttatatcatgcagatccggaagaagtgaaacttattatggtggatcccaaagttgtagaactcagtgtttataacgggattccacatttgttgattccagttgtaacggatccgaaaaaagcagcgggagctttgaattgggcggttgccgagatgatgaagcgataccagctgtttgcccagcaaaatgtccgggatttgaaaggctataatgaaaaaatcgcacagagcacagaggcggacgcaccgaaaaaattgccgaagattgtgattattgtagatgagctggcggatctgatgatggtggcaccgggggaagtggaaagtgccatctgccgtctggcacagcttgccagggcagcagggctgcatttgatcattgcaacgcaaaggccctcggtaaatgtcattacgggtctgatcaaggccaatatgccgtccagaatcgcattttctgtttcatcaggagtggattcccggacgatcattgatatgaatggagcggagaaactgcttggaaagggagatatgctgttttatccgacaggatatccgaaaccggtccgtgtgcaggggtcctttgtttcagataaagaagtgcagaaggttgtggactatttgattgaacacaacggaaacgctgcctacagtgaagaggtggaagagcacgtcaattcagatttgccgtcgctggttccggggatgccgggaacagcagtacaggacaatgcaaatgagcaggatgcgtattttgcagatgccggacggctgatcattgaaaaggaaaaagcatccattggaatgctccagaggatgtttaaaatcggctttaacagggctgcacggatcatggatcagcttgccaatgcaggtgtagtcggagaagaagtcggaacgaaaccaagaaaagtactgatgacaaaagaggaatttgaacagtacatccaggaaaatttataatgcagtggaggaaaaaggatgaaaacagatattcagatcgcacaggaagcagaattgatgcatatcaaagaagtagcagcgtctatcggaatttcagaagaagagctggaattttacggaaaatataaagcaaaactttcagatgaactctgggagagtgtaaaggaccgtgaagatggaaaactggttcttgtaactgccatcaatccaactccggcaggggaaggaaagacaacgatcacggtggggcttggagaagcacttgcaaaactgaacaaaaaagcaatgattgcactgcgagagccatctcttggtccatgcttcggaatcaaaggaggagccgcaggcggcggatatgcacaggtgcttccgatggaagatctgaacctgcattttacaggagattttcacgcaatcacttcggctaataatttattggcagcaatgcttgataatcacatccagcaaggcaatgcgcttggaattgatccgagaaatgttgtgtggaagcgttgtgtagatatgaatgacagagttttgcgcaacgttgtagttggacttggaaacaaaatggatggaatggtaagagaagatcattttgtcatcacagttgcatctgaaatcatggcaatcctttgtcttgcagatgatcttgcagatctgaaacgtcgtttgggccagatcattgttgcatatacatttgacggaaatccggtcacagcggatgatctccaggcaacaggtgcaatgacagcgttgttaaaggatgcaatcaaaccgaatatgatccagacactggaacatactcctgcattggttcatggaggaccgtttgccaatattgctcatggctgcaacagtgtgcgcgcaacaaagcttgcattgaaaatcagtgacattacggttacagaggctggatttggagcggacctcggagcagaaaaattcatggatattaagtgccgaaaagcgggcctgaagccggatgctgtggtacttgtggcaactgtacgtgcattgaaatacaatggtggagtggcaaaacaggatttgggcgaagaaaatctggaagcgttggaaaagggaatcgtaaatctggaaaaacacattgaaaatattcagaaatatggagtaccggtagttgtaactctcaattcattcattacagatacagaggcagaaaatgaatttatccgaacattctgtgaagagagaggatgcgaattcgcgttggcaaaagtctgggaaaaaggtggagaaggcggaatcgagctggcagaaaaagtactggatacgctggaaaataaagaaagcaatttccatgtattgtatgaagacgaactctctttaacggataaaattgaaaaaatttcaaaagaaatctacggtgcaagaggagttgtttatgaaccggctgcgaagaagcagcttgcaaaaattgaagagatgggattcggacattttccaatctgtatggcaaagaatcagtattcactgtcagacgatgcaaaaaaactgggacgtccggagaattttgatattcatatccgggaagtttatgtcagtgcaggagcaggatttgttgttgccttgaccggtgcagtgatgacaatgcctgggcttccaaaagttcctgctgcgaacaatattgatgtaaccgatgacggaaaaatcacaggactgttttaaaggagtaacagatgacacagatcattgacggaaaacaaattgcaaaagaaatcaaagataaactgaaagaagaagtatccgtgctgaacgaaaaaggcatacacatctgtctggcagtgattcaggtaggacgtgatgctgcgtcttccgtatatgtaaacaacaagaaaaaagcgtgtgcttatgttggaattgagtcggtatcgtatgaattggatgaagatacaacagaagaggaacttgtcaagctgatcgaaacgttaaatcagacggaaaaagtacatggaatcctggtgcagttaccgcttccaaaacagattgatgaagacaggatcatacgtacgatctcaccggataaggatgtggatggatttcatccggtgagcgtaggacgactctggttgggtgaaaagggatttgtatcctgtacaccggcaggaattatacagcttttgaaatattcaggaatcgaaattgcgggaaaagaatgcgttgtagttgggcgaagtaatatcgtgggaaaaccaatggcagcgttgcttttgcgtgaaaatggaacggtgacggttgcccattctaaaacggaaaacctcaaagaagtaacacgcagggctgatattttgattgcggcggtcggacgtccaaagatgatcacggcagagtacataaaagagggtgcagtcgtaatcgacgtggggattcacagagatgccaacaaccatctttgtggagatgtagattttgaggatgtatattccaaagtatctgcgattacaccggtacctggcggcgtaggtccgatgacgattgctatgctgatggacaattgcgtgcagacggcgcgtgattaggaggaatagatatgagatgtgcgcattgtaatgcgattattccggaaggctggatgcgttgtccgagatgtgggaaagacattcagatcgtaccagattataatcctttagaggatgtccttactcaggaagtaaaaggatcggtagaggatgtgacgagacagatccatacagaggatgttcgcaattttggcagaaaacagaatggatatcagtcaaaggcaacgcgggtgctcagtcaggaagagttgaatgaaatacagaccagaagagagcgtgcagcaaaaaacaggtctcgtgcagaggcaagacgaaaacagcaggagcgaaaaaagcagctgatacgcagacgaagaaaggtacttttgattttattattgtttttgctgcttttcggtgcgttgtttggatatgttatgtatcagaattcctatgccggaaaagtggcaaaagggtatgatgcattgcagatgaaagaatatcagacagcggaaaaatattttaaacatgcaatcggaaaaaatgcccagaaaccagaggcatattcaggtctggcagagacctgtatggaacagggggaggaagacgaagcagaatccgtatttctttcggcgattgcctcttatccatccaatcaagaattgtacaaggcagcaatccgcttttatgaagagtcaaaacaattggaaaaaattccggaaattttgggagactgtgaggatgaagcggtattgtcaagtttgaaggcgtacatttctacagatcctgtttttagtctggatgaaggtaaatatagcgaagtacaggaagtgacgctgtctgcatctggagaaacgatttattatacaacagatggaagtgatccaacttcagcaagcacagaatatacggaaccgatccttctaagtacagaaggaaaaacgcagattaaagcgattgcctataacaagaagaaaataccaagtttaatcgtgtccaaaacgtatgagatcgaatttccggtggcagatgcaccggtcgtcacaccgtctacgggacagtatagcacggcgactcagattgcgattacagtgccggaaggctatacagcttattatacgatcgatggatctgtaccaacaacagaatccatgctgtatacaggtccggttgaaatgccggaagggcagacattatttagtgcagtcctggtaagtaagaccggaaaaatgacgcagattacaaagagaaattatatttatcagccgcagtaatgtggctgattttttgaaaaaacaggtgttacaaaaatgcaattggcttttcttacaaaaatagcactggttttttgtgcattatttaacgaaaaaaatcaatagttttgttgtgtgaaaagtttcacagtggtataatgattctagttgagaacaacagactttaatcaaaggagatgcagaacaatgagcagattttgtttaccaagagacatttatcacggaaaaggatgtctggaagaattaaagaacttgaaaggaaaaaaagcaatccttgtagtgggcggcggatctatgaagcgtcagggctttctggacagagcagtagactatctgaaagaagcaggaatggaagtacagttattcgaaggtgttgagccggatccttctgtagagacagttatgaaaggtgcagaagcaatgcgtgctttcgaaccagactggatcgttgcaatgggcggaggttctccaatcgatgctgcaaaagcaatgtgggcattttatgagtatccggatgtgacatttgaagatctttgcattccatttaacttcccggaattgagacagaaagcaaaattcgcagcgattccttctacatcaggaacagctacagaagtaactgcattttcagttattacaaactatcagacaggtgtaaaatatccactggctgactttaacattacaccggatgttgcgatcgttgatccggatctggtagctggtcttccggttaaacaggttgcatatacaggtatggacgcattgacacatgcaattgaagcatatgtttccacattgaacggaccatttacagatccacttgcactgcaggcaattgaaatggtactggataatcttccggcatcttacaactgcgatatggatgcaagagagcagatgcattatgcacagtgtctggcaggtatggcattctcaaatgctttgcttggaatcgtacattctatggcacataagacaggtgcagcattctcaacaggacatattcctcacggatgcgcaaacgcaatttatcttccatatgtaatcaaatacaatgcaaaagatccggttgcagcaaaacgttatgctgaggttgctcgcagaatgggacttccgggaacttctgaaaaagcactcatcaacagtctggttgaaaagatcgatgactttaatgtaaaactgaatattccaaagacactcaaagagtttggaattgaagagaatgaattcaaagaaaaagttgctaagattgcagaactggcagtaggtgatgcatgtacaggatctaatcctcgtgcaattgatcctgcaacaatggaaaaattattcacatgtacatattacggaacagaagttgatttttaatcgaatcagactggccgtttgtgaatgaacgagagggacaggcacagtacaaaaagaagtgtctgtcctcttttagtatcaagataaaatcacgaacaactattgccattatgccaataatggcgtattattaagaaaggtgatttattacaaggaggaagaacatgtataagattttgaaagcagaaaaattatctgagaatatttttctgatggatgtgcatgcaccaagggttgcgagtcattgtgaaccagggcagtttgttatcgtaaagatggacgagaagggggagcgtatcccgcttactatttgtgattatgacagagaagccggaacaattacgatcgttgttcaggaagtgggagcttctacggtaaagatgtctgaattaaaagcaggagattctttccgtgattttgtaggcccacttggatgtgcttctgagtttgtcgaggaagatattgaagagctgaaaaagcagaagattttatttgtagcaggaggacttggtacagctcctgtgtatcctcaggtgaaatggcttcacgaaagagggattgatgcagatgtaatcatcggagcaaagacaaaagatcttgtaatcatggaaaaagagatggaagcagttgccggaaatctttatgtgacgacagatgatggatcttatggaagatccggtatggtgacacaggtgatcaaagatctggtagaaaaagaaggaaagcattatgataaatgtgttgcgatcggaccgatgatcatgatgaaatttgtctgtctgctgacaaaggaattgaaccttccgacgattgtcagcatgaacccggttatggtagatggtacaggaatgtgtggagcatgccgtcttcaggtcggagatgaaattaaatttgcatgtgtagacggaccggagtttgacggccatcttgtagattttgatcaggcaatgaagagaagccagatgtacagaacagcagaaggaagagcaatgctgaaattgcaggaaggtgatacccatcacggcggatgcggacattgtggaggtgacgactaatggcaaagggaatggagagagtacctgtcagagaacaggatccaaaagtacgtgcaacgaattttgaagaagtttgccttggatataatcaggaagaggcaatggaagaggcgacaagatgtctcaattgtaaaaatgcaaaatgtatcgaaggatgtccggtatcgattaatattccggcatttattcaggaagtaaaggaaggaaatatcgaagaggcttataagatcatcggtcagtcttccgcacttccggcaatttgtggacgtgtctgcccacaggaatcgcagtgtgaaggaaagtgtatccgtggaatcaagggagatccggtatctatcggaaagttggagcgttttgttgcagactatgcattggagcatgatattaaaccggaaggagcaaaagagcagaacgggcataaggtcgctgtaatcggttctggtccatccggacttacatgcgcaggagatcttgcaaagctgggctatgatgtgacagtatttgaagcacttcatgagttgggaggagttcttgtttatggaattcctgagttccgtcttccaaaacagaaggttgttgcaaaagagattgaaaaagtaaaagaattaggtgttaaattcgaaaccaatgttgtaatcggaaaatcaacaaccattgatcagctgatcgaagaggaaggatttgaagctgtattcatcggttctggtgcaggacttccgatgtttatgggaattcctggagaaaatgcaaatgaagtattttctgcgaatgaatacctgacaagaagtaacctgatgaaagcatttgatgcttcttatgatacaccgattgctgccggcaagaaggttgctgttgttggtggtggaaacgttgcaatggatgcagcaagaacggcacttagactgggagcagaggtacatgttgtatacagaagaagtgaagctgagcttcctgcacgagtagaggaagtacatcatgcgaaagaggaaggcgttatttttgaccttctgacgaatccaaagcagatcaatgtagatgaaaatggaaatgtcaagagcatgacagtgatcaaaatggaacttggcgagccagatgcatccggaagaagacgtccggtagagatacctggatcagagtatgatatcgatgtagatactgtgatcatgtctctgggaacttctccaaacccattgatttcttctacgacaaaaggtctggagatcaatcgcagaaaatgtatcgttgcagaagaggaaaacggacagacatcaaaagagggtgtttatgccggtggagatgctgtgacaggagctgcaacagttatccttgcgatgggtgcaggaaaagcaggtgcaaaaggtattgatgagtacctgaaaaacaaagaaaaataaaaacataagcagcagatgaaagtctgtaagagagactccgcatggattcttcttccgaatattcgggaccggatgatatgcggagtgttttgtgtgtataaggagagaaaagatgacaaaaaaagaactggcgttggaatatcacaaaaaaggatacaattgtgcacaggcggtggcatgtgcattttgtgaggaacttggtgtaaatgaaaaagaaatgtatcggattgcagaagggtttggacttggcatggggatgatggatacatgcggagctttgacaggtctttttatgctgatcggaatgaaaaacagcggcggaacttctctgccaggaaaaacaaaagcagatacttataaaaaaacaagagagtatgctgccaaatttaaagagattaatggttctgtttattgtaaagaattaaagggagtcgaaacaggaaaagtccttgcagtatgtgacaaatgtattttagatgcagtggagctcacagagcagttcctgagagagaactaagatggaaaaaatgaaagcaagacagattctgtcaatcactttgacactattcgccgtctttttcggtgccgggaatatgatctttcccccggctatgggacagcaggccggagaaaactacattcaggcattggctggatttattctgacggatgcggggattgcattgctgggcatgattgcggttgttttggttggaacagaagtcagtgatttgggagaactggtcagcagaaggtttgctgtgtttttgtcggtatgtatctatcttttgatcggaccgttgtttgcacttccgcggacaggaagtgtttcttttgaacttgcggtacgttcttatgtgacagagccgaatgtgtggtgggtatcgctgatcgtgaccgggattttcttcggtttgacatattatctgagtggaaatccaaagaaggtagtaaatctgattggtaaatatctcacaccggtactgctgatctgtattactttgatctttctggcctgcatttttctggagaaatcaccgcatggccggattcagtatggcagtatcggtgaaccgaagggagcatatgctcagattccattttttcagggaatgatcgaaggatattatgcactggatggaccggcagggctggtatttgcaatcattattatcaatgccgtgcgcggatttcaagtgaaaacaaagaaaaatattgtgaaatacacgttgctgtgtggcgcaggggcagcattgattttgtccgttgtctattatatgcttacctacattggagcagtgacgctgactccattttcaaatggaggaagtctgctgcatgcagtggcaagtgaccttctggggccggcaggcgggattgttctgggaattgcagtgttttttgcatgcatgacaacgtcaatcggcttgacgacatcttttgcagattatttccatgaattgtttcccgatatttcttacaagaaaatcacagcgattgtatgtctgttcagttttgtgatcagcaatgtgggattggatatgctggtgaaagtagctctcccggtgttgatgatgatttatccggtgacggtggtacttgtagtattgtctttttttaaaaagtggatcggcgagcggaaaatggtgtatgtgttgggaatgttgtttgccttctgtgtggcatttatagatgggatgcagagtgtgaatattacgtttggaccagttacagaactttgtcagcagcttccattttatgaattgagacttggatggatcataccggctgcagcaggagctttattgggatttctgccaatatggaagaggaaaaggaattaacagaagaaatttatgaaaggcggaaaatacaagaagtgtcagtacagggagtccgaaagggctccctttttgtagagatttcccagtatccgtgatatagtaagaagagaaaaatagatgaggtacaaaatgatagaaaaaatcagagaagagttgtatcaacttggagaagaagagtacagacagtttaatcaaaagctgattccgggagtggagcatatgattggtgtccgcctgccgatattgcggaagatggcaaaaaatattgcccaaaaagaatggcgaccgtatttggaagaagccaggataaaaattggaaaacagtccgcacatgaggaaatcctgcttcagggacttgttattggatatgcaaaaatgtctatagaggagaggatgtctgcactggatgaatttattccaaagattcagaactgggcagtttgtgacagttgctgtatgggatatcagtttatgaaaaaagaaccagaactatggatttcttatttgcaaaaatattggacttccagccaggaatttgaagttcgttttgcagtcgtagcccttttggcacatgatatcaatgaaacatatattgaacaaatcttttcaattttaaatgagatccagcatgaggggtattatgttaagatggcagtggcgtgggcagtttccatctgttatgttcagtttccggcttcaacaaaggtgtttcttgcgaaaaatcaactggatgacttcacgcagaataaagcgatccagaagattcgggagtcttatcgtgtgagcaaagaggaaaaagaggagttgaagcagttcagacgaaacagataaattcacggaaaaatatagaaaagggatggataaaatgaaaattacgttaattacggtaggaaagatcaaagagaaatatttaaaagatgccattgcagaatattcaaaacgtttgagtaagtattgcaagctggaaattgtagaggtgcaggacgagaaaaccccggatcaggcaagtgagacagtggaagaaaatattcgaaataaggaaggagaaaaaatcttaaaatatatcaaagatgatatgtatgtgattacactggagattgcaggaaatatgcttacatcagaagaactggcagaaaagatcgaaaaactggggattcagggaaaaagcagtattgcctttgtaatcgggggatcgatcggacttgggaaagacgttatgaagcggtcggattatgcactgagtttttcaaaaatgacatttccacatcagctgatgcgggtaattctgctggaacaggtgtatcgcagttatcggatcatcagtggggagccatatcataaataaaataaaaggtcatcttgcgaattttcttgcattttatcatggagatgatgtataatcgaaaagataaaagacattgtgttgaatatgaacgctcaaatggtatgtgtagaagaagcggaacacaatgtaataacacaaaggaagagagaggaaacaagatgaacgaaaatcaggtgaaaaaattggtaatgtcagcaatgtgcgtagcattgggaattatacttccgatggcgtttcatacgattcaaaatgcaggaagtatttttctcccaatgcatattccggtgttggtatgtggtctgctctgtggatggcagtatggtttgttatgcgggattttagcgccgcttttatccagtatgtttacaggaatgccgccggctgcgattcttccggcaatgctctgcgaattggcggtatatggggtgattacaggagtttgtatgcatggaatccaggcagaaaagcagattgtgaaaatttatagttcccttattgcggcaatgcttgcaggaaggattgtcagtggaattctaaaggcttttattttcaatgtgggagaatacagctttcagatttttattacgtctagttttctgacaggaataccgggaattctgatccagctgatctttgttcctgtgattgtgcttgcgttgcagaaagcgggaatagcggaacagaaaaggagataatctatggatatcaaaacgtactttgatgaaagagcagcgcattgggatgagggcggacagccaattgatgaagtaaggcgtacgattgcatttttaagcgacatacggccggctatgcatgtgctggatgttgcatgtgggacaggggcgatgtttgcagcattgaaagaacagaatcctgctcatattacggcaatcgatctttctgaaaaaatgtctgagattgcacagagaaaagttcagggtgatccactatttgacgtacggtgtcaggatttatttgagatgacgcaggagatatttgacagagtgatcatctacaatgcatatccacattttatggagaaagaaaaacttgtgagaaaggtagcggagctgctgaaaccagggggaaggtttgtagtggcacatggagcatgcagagaaaaaattaacggatgccataaaaatgttccaaaagaaatcacttccggacttttgtcagcaaaagaagaaattcatggttgggaaacgtattttcatatcgatatgcagattgatacagaacaattttatttgttttcaggaataaaataaattttggtgtgatatctgctctgattttgattcgaaatgcaaggaggaggcagtatgaaaacaatttattataatggaaccattcttacgatgcgtgatgcagaactctatacagaagcagtttgtgtggaaaatggccggatcctggccacaggaacactggaggatatgatgcagtataaagcacaggacgatgagatggtcgatctgcagggaaaaacgatgcttcctggatttatagatgcgcattctcattttgtcggggcagcgaatgcgatgacacagtgtgacctctcagagtgtaccagtttttcgcaaatcgtagagtgtatgaagatgtttatccgaaaaagaaaattaaaagaagaggactgggtcataggatgtaattatgatcagaattttctggaggaaaagcagcatccggataaagcagtattggatgagatcagtatgacaaatccagttctgctgattcatgcttcttcccatatgggagtggcgaacagtaaaggattggagcttttgcagattgacgaaaaaacagaagactgtccgggaggaaaatatgggcggattgcaggaaccaggattccaaacgggtatatggaggaaaaggcgtttctggaatttcagtccaggctgccgatgacttcaatggaagaactgatgcatttgatcggggaagcgcagaagatgtatgccagctacggggtgacgacggtccaggatggaatggttggaaaaccgttgttccaactgttgaaatatgcagcatctgaggggcttttcaaattggacgtagtcggatacgcggatattatgacagcggcagatcttttggaacaagaacctgcctatgcaaatcagtatacgaatcatctgaaaatgggtggctataaggtcttcctggatggatccccacagggaaggactgcatggatgacacagccgtatgagggaggatcagagtattgtggctatccaattcataccgacgaggagttgaaatcatacattgcgctcgcactggagaacaagcagcagctcctggcacattgcaatggagatgctgcagcagagcagtacattgcacaatttgaaaaggtactttcagagaaagaagataaaaatctgtatcgggcagtaatggtgcatgcgcagcttgtgcgaagagatcagctgcagagaatggcatctatggggatgataccaagtttttttgtggcacatacgtattattggggagatatccatcttcagaattttggagaaagacgaggcagtcagatttcaccggtaaaagatgcgattgattacggcatgaagtatacattccatcaggatactccggtagttcccccggatatgatgcgtacagtatccagtgcagtcaatcgtgtgtcaagaaatggagtttcgatcggagagaaccaaaagatttctgttttggatgcactcaaggcaattacgatttatgcagcatatcagtattttgaagagaaggaaaaaggaagtattgagcgtggaaaatatgcggattttgtagtgttggaaaaaaatccgctggaagttgcgaaagaagaaatttcagaaattcgagtggttatgacaatcaaagaaaatgaagtgatctaccaaaacagagatttgtagagttttaaaagcggacagcaagtgcacttctgagagaaaatcagaagatgcacctgctgtttttttaaaatgggatattttttacagagagattccaggatttcgatgtgaagttcttcatccaggataatacgctatctgaagaaaggaaaatactattgtagagataaaggccgatcgtagacatttctgattcctgtctgcccatattatccaacatcgtgataagtttacagaactatcctatgaacatatggcgtaaaatatgtgatcgttggaaaacaaaaaagattttcattcaacggacagttaaaagaacgaaaaggaaataaggacatataaacagttctgccgcacagaaccaaaatcctgtgcggcagtgttatgatcttatgaagttgtatgttccagatttttgtttgcagtagaaagcatcagtttgattcgattgagttgattgacttcactggctcctggatcaaagtcgatggctacaatattagaagctggatattttcttcttaattctttgatcacgccttttcctacaacatgatttggaaggcaggcgaaaggttgtgtgcagacaatattggcagcgcctgcgtggattaactcgagcatttctccggtcaaaaaccatccttcaccggtctggtttccgatggaaacaatttctgatgccatttcagccagtttttcaatttttgcaggcccttcaaaatgtctgctttcttcaaatgccctgcttgctggtgcacggaaccattccagtgcacgaatgccgaggtttccgagtaccgctttggattttttcatacccagatgggacactttgaaattctggttataaaaacagtagagtaaaaagtccaatagatccggaactacagcttctgcaccttctttttccagaagttccaccagatggttgtttgccgctggaaggaattttacaagaatttctccaacgataccaactcttggtttttttacatccagtgtttcaatctgatcaaattcccggatgatctcacggcataattttttaaacgtatggcgatgcggatatccgttagacacaaagtttttacagatttttttccatttttcgtgaagggcatccgttgttccaggtactttttcatatggacgcattcgatacacgcatttcataaaaatatcgccaaatacggcgccatataaaccgcgcagtgcgagcagtggagtaattttaaatcccggattgctttccagtccgctcaaattcagtgaaatgactggaatgtgagaataaccggcttttttcagtgcgcggcggatgaatccaatatagttggaagcacggcagccgcctccagtctgtgtgataatgacagccagatgatcggtatcatattttccggataagatcgcatccataatctgaccaacaacgatcagagacggataacaggcgtcattgtttacatattttaatcccatattgacggcttgtttgttatcgttgggaagaatctccacctgatagccggatgcacgaaatgcgggctccaaaatttcaaaatggatcggtgacatctgtggacacagaatggtgtatttttttcgcatttcttttgtaaatggaattttttcaatggaagaaggctggatcacacgttctgtcttttgttgttctcttacccggatggctgcaagcagagagcggacgcggatgcgagcagctcccaaattattgacttcatcaattttcagcgatgtataaatcttgccggaacgggtcagaatatctgctacctggtctgttgtaacagcatccagtccgcagccaaaagaattaagctgaatcagatccagattttcttttgtttttacgtagttggcagcggcatatagtctggagtggtacatccactgatccataacattgagcggtcgttctacttcatgcagatgagagatggaatcttccgtcaaaaccgcaatattataggagttgatcagttccggcaagccatgatttacttccggatccgtatggtaagggcgtccggccagaacgattccccgattgccggtttcatccagaaacttgatggtctcttctcccttgcgctgcatatcttttctgcaggaagccagttccatccatgccgcatgaacggcagtgcgaatttcatctgcggagatggaaaatttttcacccagctcttcgatcagtcgaaatgcaagtgtctcttcactctggaacgataaaaacggatgcataaagtccacgtctccggtcacgattggatccatgttatttttaatattttccggataggaagtgacgatcgggcagttgtagtggttattcgcagattcaaattccttgcgttcatatgggacacaaggataaaaaatatgtttgattccttcgttgatcagccattgtacatgtccgtgcgccagttttgccggataacattcggattcacttgggatcgattcgatgccaagttcataaatcttccgtgtggaagccggagagaggatgacgcgaaatccgagttttgtaaagaacgtataccagaatggataattttcatacatattcagcacgcgtggaagaccaatggtgcctttggaagcctcttcttctgaaaggggagtgtatccaaaatagcggttcattttatattcaaacaggtttggcagatgattcgcagatttttcctttccaagtccgcgttcacaacggtttcctgtgataaattttcttccgccgctgaaatgattgatggtcagacggcaattgtttgtgcatccacggcatttgctcatggtggttttatattccagagcttcaatctcctcgattggaagcatggttgtgccctcgcagtcatgatagcgttctcttgcaatcaaagctgcgccgaatgctcccatgattcctgcgatgtcaggtcggatggcctcgcagtctgcaattttttcaaaacttcttaaaacagcattattatagaaagtacctccctgtacgacgatatgctttccaagttctgatgcatccgatactttaatgaccttaaacagtgcatttttgatgacagaataggcaagtcctgccgaaatatctgcaacagaagcgccttctttctgagcctgttttactttggagttcataaatactgtacagcgtgttccaaggtcaatcggattttttgcgtagagagcttcctgtgcaaaatcttctaccgtatagtttagggattttgcgaaagtttcaataaaagagccgcatccggaagaacaagcttcatttagctgcacactgtctacggtttgattcttgatcttaatacacttcatatcctgtccgccgatgtcgaggatacagtctacgtccggttcaaaaaatgctgcggcatagtaatgggaaacggtctccacttctccttcatccaaaagcagtgcagctttgatcagagcttctccatatccggtggaacaggagtggacaatttccacgccttccggcagctggctgtaaatgtctttgatcgctcggatcgttgttccaagaggatctccgtcattattgtggtaaaaggaatacagcaaagtgccgtcttcgcctaccagagccgctttcgttgttgtagaaccggcatcgattccaagaaaggcttttccctgataagaggcaagatccttgacaggaacctggtgtttcgcgtgtctggaagtgaatgcatcatattctgcagaagaggcaaacaaaggctccagacgttcgacttcaaattccagctcaattttattcgcaaggcggttttggagtgtctgcagcggaatatctacattccgtttggaattgagtgcagatccgatcgctgcaaacaaatgggaatgatttggagcaataatatgttcatcatctaactttaatgtacggataaaagcttcccgcagttccgataaaaagtgaagcggtccgcccaaaaatgcaacatgtccgcgtataggttttccgcaggccagtccgctgatggtctgattgacaacagcctgaaaaatagaagctgccagattttctttggaagctccttcattgatcagaggctggatatccgattttgcaaaaacaccacagcgtgctgcaatggaatataaagaagtataatttttggcgtattcgttcaaaccacttgcatcagtctgaagcagggaagccatctggtcaatgaaagaaccggtacctccggcgcagacaccgttcatacgttgttctacatttccaccttcaaaataaatgatttttgcgtcctcaccgcccagctcaatggctacgtctgtctgtggagcatagtcctgcagagccgtggaaacagcaattacttcctgtacaaatgggacatgtaagtgtgttgcaagagtcagtccgccggatccggttatgacaggagaaacatggattggcccgagtttataaatggcccgtccaagaagatcggacaaggtttcctgtatgtttgcaaagtgtcgttcgtaatcagagaacagaacctcattatccgctcccaggactgcgatttttacagtggtagaaccgatgtcgattcctaaagtatataattcgttctttttcatagtaattcctcatcttttgctaaagttatagtagttattacttattaaatgcagtcgttattttacaacagtttatattatacgacaagcagtctaaaaacacaattatgattgttcaccataaatatacaagaaatcttaagaaaaaaatagaaaatctcataaaatttaacacaattctaacgcaaaaagtaaaactattgtttgacaaaaagtagtgctccttgtacaattactctctgtaagggaataaatatataaggagagattgtcattgaattggttaaacaagctggaaagaaaatttggacgatacgccgttcataatctgacgacgtacctgattggggcatatattatcggatatgggatttatctgcttatgcctggcatgatgaattggctgtatctgcagccgggggcgattctgcacgggcagatatggagaattgtatcctgggttttagtaccgccgcagggcagtcttttggggatcatcattatgctgatgctgtactattctcttggaaccacactggagagaacatggggggcattccgctataatgtatacatcttttcgggaattttgtttacggtattgggagcgtttgtactgtattttttgtatggtccgggagctgatttcctgggtggatatttcagcacatactatatcaacctctcgatttttcttgcgtttgctgcaagttatccggatatggaacttttgctgtatttcatccttccaattaaaatcaaatggatgggactggtctatggggtgtacatcctttaccagttagcaacaggcaatctcgcatcgcgagttgtgattatttcatcacttttgaattttgtcgtgttctttttatccagcagaaatatgaagccgtatacaccaaaagaacagatgcgcagagcaaaattcaagaagcagacaagaccgcatatgacatatgcaaatggcgcaaaacatcgctgtgctgtctgtggaagaacagaattggatgatccgagtctggaatttcgattttgttcgaagtgtaatgggaattatgagtattgccaggaccatctgtttacacaccagcatgtaaaataagaataaggataagttagaaggagagttatgagtatgaaaaaaacaaaagtagtctgcacaatggggccgaatacaaatgacagagaagtcatgagaaagttgattcagaacgggatggatgttgcacgtttcaatttttcacatggtgatcatgaagaacagaaatttcgtatggatcttctgaaagaacttcgcgaggaagagcatgcacacactgccattcttctggatacgaaaggtccggagattcgtacaggtcttttgaaagacggaaagaaagtaaccctccaggaaggcaatacatttgtacttacaatggaagatattgtgggagatgaaacaaaagtttctctttcttataaagggcttgctgaagatgtacagcagggaaccgtgatcctgattgatgatggattgatcggattaaaagtaaaagaaattgcggatcaggatattgtctgtgaagttgtaaacggtggagaactcggagagcgaaaaggagtaaacgttccgaatgtcccggtaagacttcctgctatcacagaaaaagataaagaggatatcaaattcggagtagagcaggagatagatttcattgcggcatcctttgtccgtaacgcagagtgtgtacttgagatccgttctttcttaaaagaactgaatgctccatacatcccgatcattgcgaagattgagaatgcagaagggattcgcaatatcgatgaaatcatccgcgcagcggacggcattatggtagcaagaggagatatgggtgtggagattccggcagaggaagttccatacttgcagaagatgctgatccagaaatgtaacaataattttaagactgtcattacagcaacacagatgctggattctatgattcggaatcctcgtccgacaagagctgaggtgacagatgttgccaatgcagtatacgatggaacagatgctgtgatgctttccggtgagactgcacagggaaaatatccggtagaagctttgcagatgatggttcatatcattgaaaatacagagcagcacctggactatgatatgattctggagcaggccggagatcatctgaagagaggaatttccagtgcaatcggatattcttctgttttagcagcagcaaatctgaaagcaaaggcaatcattacaccgacagtatcaggggcaacagccagagtgatgtccaatttaaaaccaattcagccaatcattggagtaactccaaatgaaagagcactgcgcagaatgtctatttattggggagtgcaggcgcttaaatcgatggagtgccatacaacagatgatatctgcagtgcggcaattgagatttcaaaggtaaaacagtgtgtggaatccggagatgttgtggtactgacagcaggaattccggcaatggatgtcaatgcggcccgtgagggaatcagcaatatgatgagaattgcaacaattgattgaatagagtgagaacgaaatgccgcttatggaaaaattccgtgagcggtattttattgttgacaagtattataaattcccgtatagtgtttcttgaaagaactactaatataatgtgggagaaaatgatggaacagaatccgtatgtagagtacctgcttcattttggaatgacaaggcaggaggctttgatttatgtagagctgctcataaaaggaaagcagacaggatatgagattgcgaaggaaacggggatttccagatcgaatgcatattctgcactggcagcgctggtagaaaaaggagcggcttatgtggttgaagagtctgcaaagcgttatattccggtgggagttgaggagttttgtggaaattgtattcgcagaatgcaaatagaaatggaatggatgacaaggaaccttccgcaaaaaagagcagagatggaaggatatatcacgatagaaggggaacagaatattttgaataaggttaaaaatctgatctcacaggcaaatgagcgggtatatctttcctgtacagcaggatacctggatgtattccggccggagttggaaagcctgatagaaaaaggacgaaaagttgtgatcctgacagatgcactgtacaagctggagggtgcgattttttaccagacagaagataaggagcagcagatcggattgatcgtggattcgaaaagtgtgctttcgggagagtacggaaatggaagcctgaacacctgtctatattccgggcagaaaaattttgtgacagtatttaaaaatgcaatggcaaatgagataaaattgatccaattacaagaaggaggaactgaattatgaataagacaccatttgtaacaaaagagcagttggatgagattgtaaaaacatatccaactccgtttcatctttatgatgagaagggaatccgcgaaaatgtaaaggctcttcgcgaggcgttttcctggaataaagggtataaggagtattttgcggtaaaggcgtgtccgaacccatttttgattgatattttaagggaatatgactgtggatgtgactgttcttcttacacagagctgatgttgtcagatgcaatcggtgtgaaaggggcagatattatgttttcttccaatgacacaccggcagaagattatgcgctggcagaaaaactgggagcaatcatcaatctggatgatttcacacacattgattttctggaaaaaaccatagggtatattccggagacgatcagttgccgttataatccgggaggactttttaagatcagcaatgacatcatggacaacccgggagatgccaaatatggaatgacaacagagcagctgtttgaggcctttcaggttctgaaaaagaaaggggcaaaagagttcggtatccatgcatttctcgcaagtaatacagtgacaaatgactattacccgatgctggcaaaagtattgtttgagcaggcagtgaagcttcagaaggaaacgggagtgcacatcaaatttatcaatctgtcaggggggattgggattccatatacaccagatcaggaaccaaacgatattcgtatcatcggtgagggggtacgtcgtgtgtttgaagaggttcttgtaccggcaggcatgggggacgtggcaatttatacagagcttggacgatttatgatggggccatacggatgtctggtcacaacagcaatccatgaaaagcatactcacaaagaatatattggcgtagatgcctgtgcggttgatttgatgcgtcctgcaatgtacggagcttaccatcatattacagtgatgggaaaagaaaatgcgccacatgatcacaaatatgatgttacgggatcgctttgtgaaaataatgataaatttgcgattgacagaatgcttccagagattgaaaaaggtgattatcttgtaattcatgatactggggcacacggatttgctatgggatacagctataacggaaagctgaagcatgcagaattattactgaaagaagatgggagtgtacagatgatccgccgtgcagaacgaccggcagattactttgcaaccttcgattgttttgacattggaaaaaaattgataaaaaaataaaaaaagacttgcaaagttaagaaaaccatgatattatactttttgttcgggagctgagaaagttcccgagtataagcggatgtggcggaatggcagacgcacaagactcaaaatcttgcgtaggtgactacgtatgggttcaagtcccatcatccgcagtttgaaaaagccttgagtttcaaggctttttttgcgttttaaagagttttttcgaaagaacagacagaaaaagagaaccatagtcaggaaatttcagataacaatctgctgagaggtttatccccaagaaaatacaactggtgcagtgctctggtgatggccacataaagcagttttgcctcttttggattctctgcgtaatgctcatcatctgatttccagagaatcactgcatcaaattccagcccttttgtgagagtcaccgggagcaccatgataccattatggaagtcctgttcctcctcttcgatttccagtattcgctttacctcgcatgcttcttcttcagttctgcataccacggcaatggtttcaaaaccttccttctgtacttttgcagccgtgttctttaacagtgcttctagcgcttctccttcttcttgatatacccgaacttcctgtccatgacggatgacaggctgtattttgtaactgccctgggaggctttttccaagacctttccggcacactgggaaatttcaatggtatttcggtagctttttgccagaaggtagaagctgtcctgctctttttggaataagactttcttcaaatcttcccagtcattcataccggtttcgtagcggatgttctgagacacatcccccataatggtaaaataacaggtatccagaacctgcttcataacataatagaccataacaccaaagtcttgtgcctcgtcaatgataatctgactgaattcatcctcatcctttttcttcaagatccgtttccagatgagacagagacatgcggtatcatataggtcgaatttccccttttgcacatgggataggacgtcttctgctgctttaaaccagagaagaaattcctgataaatctgttgggccgtccacttttggtcgacagagtgataatattttttgtattcctgtagtttttgtttctggtattcttcccttcgttctgtacagagaaatttaattctggaagcaagtctggcatttaacagcttttccaattgcagcagggaaagctgaggattcctgtttttggtctcttccatattttccctggacaataaaacgcccagttcccggtctttgatcgtatccagattcagatagtgagcttgccacagctttaaaaactcttctaaagcttccgcgaatcccagtttgctctttaccggagccatagcatcttcctgtatgatctgatattttttcttccaggtatttcccataagataaggcagaaatacatccatccgcatttggcggacatggttgacatccagttccggcagaccgctgctgatataatttaacagcatatcactgcttccgacaatacaaaattccgaaggtttgtatttttcttcatagttgtacagcaaataggaaatccggtgaagcgccacggttgtttttccactgcctgccacgccctgaacaatgatattcttaaaaggagtgtcccggataatctcgttttgctccttttgaatggtggcaatgatatctcccagaacggcttctttattttgagacaaatattttaccagtaattcatcattggcagccacatcatcatcataaaagcccagcagatggctgccctgaatgtcataggttcttttcttatgcaagtcgatgtccactggctggcttccaggcactttataacagccccggcccagctcgttttcataataaacgctgcaaacgggagctctccagtctacgataatcacgtcattggaattctgtgtcacaccgtttttgccaatatacaggctttcagctacaccgtaggtttcatcctgataatcgactcttccgaaataggctttatcaaaggcggctctgtttttgcggagggcattctgagtatgttccagaatatttcttcctgctgtcaacataccataggaatccccttctcctttacgtactgcccggtaaagttccgtcacttcttttttgtactggctttccttgtcctcatatagaaggatattctgttgaatgatttcccggcattgggccagatgctgctcttccaacagctgttctttctgatgatcgtccatattttttcctcacttttctcaaatttttcactgtaaaatctgaatcaggcacttgtttccatcccaaacggcaccttccagtttcaggtaatttctcattataacaaacagcagataaaaggacaagaagctgccacatgaaatctgttatgaaatgttaaaatggacaaagcagaagaaaaacgatataattctttatatcattttttgacgatgtaaatatgttttttgattttgtacttgtgtgcggagctgtttaaaagcaggaacataagtatcaaacttccgggaggcgtttatctctggcagagtcaaacgtatgagaattgaaaatgaaaaaagaaaagaggaaaccaaattgatcttaagagcttataaaccggaggattgtaaggcgctcgcagagttgttttatgagacggttcattcggtcaatacaaaggattatacaaaagagcaggtggatgtatgggcaaccggaacagtagatctggagcgatggaatgcttcttttttggagcattttacagtgatcgcggaagaagaaaacgtgattacaggctttggagatatcagtgacgccggatatctggacaggctgtatgttcataaggaatatcaacaccggggaattgcatcggcaatttgtgacgagctggaggcacatgcgaaggggaagatatgtgagacccatgcttcgatcacggcacggccgttttttgaatccagaggatatgcggtcgttcgggaacaagaggttgtccggaaaggtgtgatcctgaaaaactatcagatgaaaaagcaagtgtagcaaggagaggcagaatgtggtatcagaaagactggtttaccggaattgattattataatttaaaagaaaaacagatccatgtaacagaaatggagatcaaaaagccggttcagcagagatttcatgaacaaacggaaatttactatgtaaaaagcggggatgcagacctctggatcaatggagaaaaatttcagatccgggaaggcagttttttctgcctgtatatgcatcttttttatcagatcgaacaaatcagaaaacctttgcagtgtgtgaaggtttcttttcatatcggtctgtttatgtttctgtgctttgaacaacggggggccaaggagaatgagatgctggtgtacggagttcagccgctgctttccctcaactcagaagaaaaacaaagagtggtaaggattctggatgatttattgaatgaagagcgggaacagcggttttcggtgcaaaatatgagcatttatcttgctatgcagctccatgctctgtactgcaggtatgcgatggaacgaaagaaaaaacaagaagcccagcaggatagtgtgtggaatgtgattcagagagtgctgctggatacaagtaagacagtatctttggaagcatatgcacggacagcaggaatgacagcggtgacattgaatcggaacattgtaaatagatgtgggtatacattttttcagcttcagaagatggggaaggtatttaatgcgtgtgcacttcttcattttccggatctgaatattcagtatatcagtgattatctgggatttacgaatgtagaagatttttacagagtatttaaacgttacaggaaagtcagtgtcagagagtaccagacacaaaacatcggatgtggagtgcagatgcagtcggaggaagagggacttcagattctggaatatcttctgctgcattttcaacgtccgtttcagatgaaagaaatggaggcggagctgaaaaagaaagggaatttgattgaaagaagggcgaaagaagtgtttggaagaagtgttcaggaattactggaagaagttcggattcgggtttcctgcagttatttgagtgcgacagaccgaacggtgacacagattagcagtgatgtgggcttcggaagcatttcctcctttcagagaagtttttttaaatatatgaatcaaacgccaagtcagttcagactttatataaagtaaataattgataacgatatattgaaatatgcatatctattttccttttactagcctataataaaagcaaaacaatggaggtagcaggaaaatgtttgaacatgtatttgctccaatccggattcgcgatatggagctgaaaaacaggattattctgccggcaatggggaccagaatggcagaagaaaacggggaggtgacagacaggctgatcgcgtatcatgcagccagagccaaaggcggatgtgcattgaatattgtagaagtggctgcagtacatacaccgagtgcaccggctcattttgtatcgatcagtgaggatgagcggattgaagggcataagagactgacagatgcgattcatgaaaatgggggaaaagcgggaattcagctctggcagggttccatcgccacatccatggatccaaaggcacagattttggttgtttctgatatgaattttggaccatatacgatcaaagcaattacaaaagagcagattcagaaagtgatcacatgctatggacaggcagcagccagagctgtaaaagccggatatgactgtctggaattccatctggcacacaattatctgccgcattctttcttaagcggcggattcaatcacagagaagatgagtatggaggcagctttgaaaatcgatgccgtttcccgttggaagtcattgatgagctgcgcagaaatatgccggaaggcatgcctctgtttatccggatcgacgcacaggatgacatgttggaaggtgggcttacgatagaagaagtgatccgtttttgtaagattgccaaagagcacggagtggatgtgttggacgtgtcccgtggtaatattattacggcagcatcgctgtatgaagtgccgccgatcgatgtgccaaacggatttaatattgaaaatgcagcaagaatccgcaaagagacaggaatgttaactgttggtgtgggaagaatcaacacagcagcgctggcagaagagattctttctcaggacaaggtggatatggttgtgatgggaagagcacagcttgcagatccggaatttgccaataaagcaagtcagggaaaagtggaagaaattgtacactgcgtaggctgcaatcagggctgttatgatggattctgtgatgtagcaaaccgtccgcacattacttgtatgagaaatccaatgatcggtcatgaggcagagtacgatctgagcaaagcggagacatcaaagaacgtctgggtgatcggcggtggtgtggcaggaatggaagcagcaaagatcctgcacgaaagaggacatcaggtgacactgtttgaagccaccgacaaactgggcggagaattccttcttgcaggagaagcgcctggaaaagcagagatgaaatccgcagcgatagagatggcggaacaggtagaaaagttggtgactgtacggaaaaatacaaaagttgatgcacagatgctggaaaacgccgatgtggacgtggtgatcctggcaatcggttcttcaccgattaccattcatttggaaggaatggagaaacttccacatgtatccgctccggaagtactcagacatgaaacttgtccaaagggaaaagtagcggtgatcggaggaggcctggttggcctggaaacggcagatactcttgcttcagacgggtgtgaagtcacggtactggagatgaaagacagcatcggaagtgatcttggaagcctgcgtaaaattgcggtgatgatgaggatgcagcagatgcaggtgaaattgctgccagacagcaaagtatgcaaatttacagaagaaggaattgtgttggaagatggaaatctggttccttgtgattgtgcagtatttgcggttggatttgcagcaaatgattcacatcctctcaaagcggtttgtgaaaagagacagattccatgtcatgtgatcggtgatgcaaagtctgcaagacgggcgctggatgctattgcagaaggatttgaagtagcaaggacactgtaggaggtagaatagatgagaacaatgtttactccgcttcagattgcgggaatgcaggttaagaacagaacattcatggctccgatgtcacttggatatgaaagccaggatggaacgattaatgaaaaaatggaagcttattggctgaggagagccaaaggaggtgtgggatgtattatcgtagatgccaccagtgtagatccgaatgttccatatcttggaaatacactctgcttccggaatgaagaaagtattcaaaagtataaaaactttaccgataagattcatgcttatggatgtaagattattccgcagattacacatccgggcccggaaagcgtcagcgcattttatggaatcgctccggtagccagcagtgtgtatccaaatgcaatggcacagatgacgagagaactggcaaaggaagaattaccgggaatcatagaactttatgccaaagcaagtaaacatgcaaaagaagcgggatttgacgggattgaactgcattgtgcacatgcgtatatgctgttgggatcatttttgtctcctctgcgcaataagcggaccgatgaatacggtggaagtctgttgaatcgtgcccgtctgctgtttgaagttttagatgccattaaagcagcctgtggagaagagttcccgatcatcttaagaatgtccggaagcgaacgggatccccagggaaatacagtagaagatatgaagcgcttaatcccgtatctggaaaagcatggggtagactgttttgaaatcagtggtggtacacagtatgagcgctgcaataagatcattccttgccacggggagacagagtttaccaatctcaaagaagcaaaagcgatcaaagaagtagccacaaaaccagtgatcacagttggaaaaattctggatgcacaaatggcagaagatgttttggaagcaaaggaagtagatggggttgttcttggaagggcacttcttgcagatccggattttgtagagaaggcggaagaaagacggtatgaagagattgcaccatgtgcagcatgtggagtcggatgtgtgggagagcagacaaaaagacgtccggcatcctgtgtgatcaatccattggccggaagagagttggaatttgaagagcatccggcaaaggagacaaaacagattctgatcgtcggagctggaattgcagggcttgcagcagccagaattcttgcaaaacgaggacatcatgttgtagtggcagaaaaagaaaagaaagccggcggtcaactgaatctggcatgcagggcgccatttaagcaggaaatctcaaaatggatcgtgtatctgttgcaggagtgtgacagatatggcgcagaagtccgttatgagacagaaataaaaccagaggatatcaaatcggagaatccggatattgtgattcttgcaactggggcagagccgtttgtacttccggtagaaggaaaagaaactctgattcaggcaaatgacgtgctcagtggaaagactgcgattccgggaggaaatgttgcagtgatcggcggcggaatggtcggtatggaaacagcagaatatctgctccatcattccagaggtacagccagagttacactgattgaaatgacagacagtatcggtcagggaatggtgccgaacaatttggtaccgactatggcacgtttcaaacaggaacaggtacaggtgatcacaggagcaaaagtaaagagcgtggaaaatggaacgattactgcagatacaccacagggagaaatgaagtatccgggatttacacatgtagtttgtgcagtaggttccaaagcatggaatccactgtatgaagaaattcagaaatcgtatgaaacatatgtgatcggagatgccaaagaagtggcgcaggcactggaagctgtgcgcgcagcgtacgagctggggtatcagctatagcagcaaaaacaatacaggatcattgtacagatgtatggtgatcctgtatttttatggattctatttaggaaaaaatcaaaatagttattgcaaaacagagtaaaaagtactatagtatctataaagaatttagataatattctaaatagattttgcagagaggatgatgtggatggcatttgcggagacttttaaagcgctttcggatccggtgcgcagagagattctggtgcttttaaaaaagggaaaactttcagcaggtgagattggagaacagtttgaaatgacaggggcaaccatctcttaccatttgaaaattctcaaaaaggcagatttgatacgagagacgaaatacaagaattttatttattatgaattgaatatttcagtagtggaagagctgatgctttggctgtcagacttgaaaggagatgcggcattatgaaagagaataagtcaaaagttatgattacaagcattgttacggtgtttccgatggtgatcggttttttactgtggaatcgtctgccggaaaagattgcaacacactttggcagtgaaggagcagatgggtggagtacaaaattgtttgcggtggtggttttgccgctgatattgttggttattcatttgttttgcctgggtgtgacattgaatgatccgaagaagaaaaatatcggaaaagcgatgatgctgctgatcttctggatcgtcccggtgctgtcctgggtgtctaatttgtctatttatggatatgcgctggggatgaatgtggatattgatatgatcatctgtatattgatgggtggtatgtttatcctgcttggaaattatatgtcgaagaatcatcagaattatacagtggggattaagctgccatggacactaaacagcgaagaaaactggaatcgtacgcatcgaatggcgggaaagttatggattttagcaggttttgtattctggggaagcatattttttaaaaacaacctgtttccaattgcaatcatagcggttgttgtggtggtgccaatgggatattcgttcctgctttacaaaaagggaatttgaaattagtctttgctatttatctctataacgtttataatagaacgatacgagataaaggagaaagaaaattatggaacagaaaatagtagcagttgtggcaggaagagaaatcaaagaagctgattttgaaaaatttttgcagaatgtaccaagagaacagcaggcatatctttccaatccgcagttcagacagcaatgtcgggatcaatttgtggcactgcatttgtttgcagaactcggtggtgagatgaagctggaagagacagcagaatatcaggaaatggtagaaaatgcaaaaagagatattcttgctcagatggcaatgcgcgaagtaatgaaagaggcagttgtgacagaggaagaaatccggaatttctatgaagaacataaacaacagtttacaaaagcagaaacagttcgtgcaaaacacattttgacagactccaaagataaatgtgatgaaattttggcggcgatccagagtggagagacatcatttgaagatgctgcgaaagaaaaatctacatgtccgtccggagcaaaaggcggagatctcggagagtttggaaaaggacagatggtcaaagaatttgaagaggcagctttcgcggcagaaatcggagcagttgtaggaccggttcagacacagtttggctatcatctgatcaaagtggaagagaaaaaggatgctgcagttgcaggttttgaggaagtgaagagctccatcagaaatcagcttttacagcagagacagaatcaagtatatcgagataaggtaaaagaactgcgtgaaaaatacgtgcaggaataaataagaccccgattggaatcaaagtttcaatcggggttctctataggagaatgatggaatgaaatgtgagatacgcaattatcagtcaaaagatctggaatccgttatgaatatctggttgcaggcaaatcttactgcacataaatttattccggctgagtactgggtaggacagtatgaggcggtaaaagaagcacttccgcaggcagagattttcatttatgaagaggcaaaaaaagtggtgggatttcttggaatgcagcaaggttatattgcggggctttttatagaaggttcctgccagtccagagggattggaaaagcgcttttggatgcggcgaaagttggaaaagaggagttgacgcttcatgcctatacagaaaatgacggggctgtccgattttatgaaagagaaggatttcagaagattcaattcaaaaaagaagaaaccacagggcgggaagaagtcttgatgcattggaaagggatagaaaaacagccttttaaaaaagaggaaattggtgtatagtagtctctgtaagtaaaatgaggagaagtgtcatgagtgaaaaaattgttttgatagatggacacagcattttaaaccgggcattttatggagtgccggatctgaccaatgcagagggtcttcatacaaatgctgtgtatggatttttgaatatcctgtttaaaatactggaagaagaaaagccagagtatttgacagttacatttgatgtccatgcacctacattccgacatgagatgtttgcagagtataaaggaacgagaaaaccaatggcagaagaactccgtcagcaggtacccgtaatcaaagaggtgctgcaggcgatgcatattgcgacaatagaaaaagccgggctggaggcagatgatctgcttggtacgatttccagaacctgtgaagaaaaaggaatggatgttgcgattatttcaggagacagagatactctgcagcttgcaaccgatcatgtgaagatccggatcccgaagacaaagggtggacgaacagaggttgaagactactatgcggcagatgtgcaggcgcggtatggagtgactccgagggagtttattgatgtcaaagctctgatgggggacacggcagataatattccgggtgttccgggagtaggggagaagactgctacaaaaattattgtagaatacggaactctggaaaatgcgtatgcacacgtggaggaattaaagccgccaagagcgagtaaaaatttaaaagaattctgggaacaggccaagctgagcaaagtcctggcaaccatcgatacccatgcagagctggaattttctctggaagatgcaaaacacggaaatatgtttacaaaagaggcatatacgtggtttcagaaactgcagtttaagaatctgttgggaaagtttgatgtagaagcatctgaaaatgaagtggaaaaaatatttcgggaagtgacagagcaggaagaaatcgcgcagatttttgcagaggcaaaacatgcggagtgtgtaggggctgcgttggtgcagtgtgatggaaatgtactgcctttattttcacatccgtcaggctatggaaggatcgctctggcatacggaaaagataaggtttgttctatcccgtgcagtatggagacggatatggatgcattatttgcacagctttctgatgtggcatgctctgccggacgttttgtgatgtttgacctgaaaaaatatcttccggtattgggagaagtccgtcaggatacatgttttgatgcaacggtggcagcatatcttctgaatccgctgaagaatgattatacctatgaagatgtggcgagagaatacctgggattgatggtcgatgagaaggcaaaagcgtggacaaaaagttgttatgaagcatatacagcgtatgcggcttctgaaaaattgatgaaaaagctgcaggaagaacagatggacaagctgtttctggagatagaaatgccacttgtatttacattgtttgatatggaacaggttggagtgcgcatcgaagcggaagaactgaaaagatatggggaacaactgggggaacagattgtacagctggaatcagagatttatgaaatggcaggagagtcttttaatatcaattctccaaagcagctgggagtggtgttgtttgaaaagctgcagatgccccatgcgaaaaagacaaaaacagggtattctacagcagcagacgtactggaaaaactggcaccggagttcccgatcgtagataaaattttagaataccgacagctcaccaagttgaaatctacgtatgcagatggtttggcaaattatatcggtccggatggcaggattcacggaacgtttaatcagacgatcacagccaccggaagaatcagcagcacagaaccgaatctgcagaatattccggtgaggatggaacttggaaggctgatccggaaagtatttgtgcctcaggaaggatatatattcattgatgcggattattcgcagattgaactgcgtatactggcgcattgttccggagatgcacatctgatccaggcatacaaaaatgcacaggatatccatagaatgacagcgtcacaggtatttaagactccatttgatgaggtgacggatctgcagagacgaaatgccaaagctgttaattttggaattgtatatggaatcagttcgttcgggctgagccaggatttgagcattacaagaaaagaagcggcacagtatatagaaaattattttgagacatatccggggatcaaaaaattcctggatgattctgttgcacatgcaaaagaaaaaggatatgcggttacgctttttggaagaagacgtccggtaccggagttgaaatcaagtaattttatgcagagaaatttcggagaacgtgtggcaatgaatgcgccgattcaaggaactgcggcagatatcatgaagatagcaatgatcggagttaaccgggaattaaagggaaaacagatgaaatcccgtatgattctgcaggtacacgatgaacttctgatcgagacacatccagacgagatcgagacagtaaaagagattctcaaacgtcagatggaaacagcggcttctttggatgtaccgctgatcgcagacatgcagactggaaagaactggtatgaggcaaaatagtatgaagatcattggaattacaggtggagtgggttctggaaagagtgcagtgcttcagcttttgcggcaggagtatggcgcagttgtagtacagctggatgaagttgcaaaaaagctgcagaaaaaaggaactccctgttggaatgaaatcatagaagtatttggaacagaaattttggatgaaacaaaagaactggatcgaaaaaaactggctcagatcgtatttcaagatcaggaaaagctggcacggctcaatgcaatcgtgcatccggctgtgaaacagtatgtgcttcttgatattgaagaaaaaagaaaggcaaagacgtcactgtatgtactggaggcggcacttcttctggaagcaggatatgataagatctgcgaagaaacatggtttatttacacggaggaatccataagaagagcaaggctgaaggaatccagaggatacagtgacaaccggatcacagatatgataaaaagtcagaatccggagagttattttcgcagaaattgtacccggatgatcgacaacagcgggacaatggaagcaacaaaaagacaaataggagagatactatgagattatgcagcattgccagcggcagcagcggaaactgcatctatgtaggcagtgaaaacacacatttattgatcgataccgggatcagtaaaaaaagaattgacgccggtttaaaagagctggatatcaaaggggaagagctggacgggattctgatcactcatgagcactcggatcacattcagggacttggagtgttcagcagaaaatatgaaatcccaatctatgcaactccgggaaccattgcaggaattcaggcatattccagactgggagccatgccggaaggactgtatcatatgatacacagtgatgaatcctttatgctgggtgatattcgggtcaatccgtttgcaatctcccatgatgccaacgaaccgaccggataccgtctggagtgcagagacaaatccgtggcagtggcaaccgatctgggaatttatgattcctatacagtctcccatcttcaaaatctggatgcagttcttctggaggcaaaccatgatctgcatatgttggaagtgggaccctatccatatccgctgaaacgaagagtcatgggtgacaaaggacatttgtccaatgaattgtcaggacgtctcctttgtgatatactacatgataatttgaaacatattgttctgggacatttgagtaaagaaaataattatgaaagtctggcatatgagactgtcaaactggaagtgacattaggagataatgactttaaaggggaagacttgaatatggcagtggcaaaaagggacagtatttcagagattattaccgtttaacttgaggaggaaaaatcatgaaaaaatgtattgtaaccgtagtaggaaaagacactgtggggatcatcgcaaaagtatgtacataccttgcagagagtaagatcaatattttagacatttcccagacaatcgtacagggatacttcaatatgatgatggttgtggatatttcaaaaattgaaaaagatttcaagttgatctgtgatgagatggaacggatgggagaagacattggcgtgaagattcagtgtcagaaagaagaaatttttgagaagatgcacagattataagaataagcgaagacgaggatataagccatgattaatatgtatgaagtttcggaaacgaataagatgatcgaacaggaaaatctggatgttcgtacgattacactgggaatcagtctgatggattgtattgattccgatttgagtgaactgaaccgtaagatatacgagaaaattacagttactgccaaagatcttgtgtcaacaggaaaggacattgaaagagaatttggtattccgattgtcaataaacggatttcaatcacaccgatcgctttgatcggtggtgcggcatgcaaatgtccggaagattttgtgacgattgcagaaactctggacaaggcggcgaaagaagtgggggttaattttatcggaggatactccgcactggtttccaagggaatgacaaaaagtgatgaaaatctgattcgttcgattccgcaggcactggcaagaacggagagagtgtgcagttcggttaatgtaggttctaccagaaccggaatcaacatggatgcagtacgtctttgcggagaaatggtaaaagcaacagcagaagccacaaaagagcatgattctttcggatgtgcaaaactggttatcttttgtaatgcgccggatgacaacccatttatggcgggtgcatttctcggagtaacagaggcggatgctgtgatcaatgtcggagtcagtggtccgggagttgtgaaaaaggcattggaaaaagtgcgcggcaaaggatttgaagaactgtgtgagacaattaaaaagactgcattcaaggtgacacgagtagggcagctggtagccggagaggcttccagacgtctgggaattccatttgggattatcgatttgtcgctggcgccgactcctgccattggagacagtgtagcagaaatcttggaagaaatcggactggaacgggtgggcgctccgggaacaacagcagccctggcgcttctcaacgatcaggtaaaaaaaggcggtgtaatggcttcttcttatgtgggaggactcagcggtgcatttattccggtcagcgaagaccagggaatgatcgatgcagtcaatgcaggttccctgacgctggaaaaattagaagctatgacttgcgtttgctccgtaggacttgatatgatcgcgattccaggaaagacatctgcggcaacgatttcaggaatcattgcggatgagatggcgatcggtatggtcaaccagaagacaactgctgtgcgccttattccggtcatcggaaaagacgtgggagagaccgttgaatttggaggccttcttggatatgcgccgatcatgccggtaaatgaatttggctgtgatgcatttgtaaatcgggcagggcgtattccggcaccgatccatagttttaaaaactagaaacaggggagaaaagatgaaaaaaattgcaatcgtaacagacagcaacagtggtattacacaagtcatgggaaaagagatgggaatccatgtgattccgatgccattttttatcgacggggagctgtttctggaagatattacactgacgcaggaggagttttataagcgtttgggagaagattctgatatttccacatcgcagccctctccgggggaagtgatggaatgttgggacgagctgctgaaagagtacgatgagatcgtgcatattccaatgtccagcggactaagcagcacatgtcatgcggcacagtctctttctcaggaatatgaagggagagtctgcgtagtagacaatcagaggatttccgtgactcagaagcagtccgtagaagatgccatcgcacttcgtaatgcgggaaaatctgcattggaaatcaaggagattctggaggcggaaaaactgcaggcaagcatctatattaccgtagatacgttaaaatatctgaaaaagggcggacgtgtcacatcggcagcagcagcgcttggtacagtgctgaatctgaaaccggtgcttcagatccagggagaaaaactggatgcattttcaaaagtgcggggatggaaggcggcaaagcgtactatgctcaaagcaattgaaaaagatttaaatgaaaggttttcagatgtcagagatgatatggtgctgggaatggcttatacttgcagcaaagaagaggcgcaggagtggaagcaggagattgaagaaaaattcccgggatatgagattgtagaaggtccgctttctttaagcgttgcctgtcacatcgggccgggggctatggcagtgacttgtatgaagaaagtctgcgcataacaaaaaggataatcgaaaagaacatggggctgtcgcactaaataattagtgcgcagcctcttttctatgcaaaaaattacagccaggcttcgaaaagcctggctgttggtgtaaaatataagtatgcaaacccctatattattacacaagaattatactttgaatgaggaaggatatcaactaaaacttcctttaaacttagaaacaattattccagtagatgattctgtgcggttgctgagtcagtttgtggaggctatggatttaacggacttatattctacttatgaaagaataaatacagtatcgccaagaacactcttgaagattgttttatattcctatatgaatggtgattattcctctcgctctatggaattgaactgtaagcgagatattaatttcatgtatcttttagagggaaaaccagttcctgaccatgccacttttgcccgtttccgaagtattcattttgctccgtgtgcgaaacgaattctcgctgaaatgtctaatctcctttacggacttggagaaatttcgggagaaacgatttttatagacggtacaaaaatcgaagcctgcgccaataaatatacatttgtatggaaaaagacggtaaccaaaaatcaggcgaagttgctgattaaaatcgccgatctcattgcagaatgtgagcaactttatggtattcggattgttcacggtgatactgttaaaatgaaacacgtaaaacggttacgcaaaaagctgtacgcattaaaacaagaagaaaacattgtatttgtacatggtattgggaaacgaaaaactcagctgcaaaagagtatcgaaacattagaagactatctggaccgtttaaaaggatatacaaaaaaactgcatatttgtggaaaaaggaacagttattctaaaaccgatccggatgccacctttatgcggatgaaagaagatgcaatgggaaatgggcagttaaagccagcatttaatttacagcatggagttgattctgaatacattgtatggctgacaatcggaccacagcccacagatactaccaccttaattcccttcttaaaggaaacagaagaatatctgacatttaagtatcaaaaaatcattgcagatgctggatatgaaagtgaagagaattatgtatttctagatcaaaatcagcagttggcatttatcaaaccatcgaattatgaaatatcaaaaaagagaaaatataaaaacgacatcggccgtatagaaaatatgaagtatgatgaaaaaagtgactcttatatttgtaaaaatgggaaacagctgccctttacacatctccgtcgctctaaatctaaaactggatatatcagtgaaaaaaacatttatcaatgtaaagaatgtaaagattgtccttacaagaaagagtgcatcaaggggaataactgtaaaacaccaatagaagagcgaaacaaagtgctttccgtagcaaaaacatttttgaaatatcgggaggaagatttggagcggattctttctgacgaaggaattcttcttagaataaatagaagcatccaagcagaaggatcttttggtgaactgaaacaggatatgcagtttcgcagatatttgagtcgtggcacagcgaatgttcttgctgaaagtgttttgctggcaatggcaaaaaatgtaaataaacttcataacaaaatccaaaaagggaaaactggaaggcatttatttcctttgaagagtgcataaatttagagaatccgaaatttttttcaaatccagttttggattgtattaaagtacggcttttttacgaaaaagctatcgtttcaatagaaacagagcaactatatagcgaaaatcagaaaaaaggaagctgccgcttcacgatttactaatcgttaaagcgacagccccatgttcttttcttatgtgatcatttactttcgacattggattcttgaaatacttttgatgtcagaaatgggaggaagaagatactggagagaaccaggtgtatcaaaacggtcttccattcaatgatgtttccagaaatggatccgttgctgatcagcccggcaacattgttgtttacaaaatgcaggatcacaggaatccagatgttatcggttttcatgtaggcgaaggcaaaaaagatactgattgcaatacaagtgacaagttgtcctgcgagactctggagtctggagtccggtgcataataaaataaattcagaggcaggtgccacagtccccataatacgccaagtatgagaacgccttttcgcattccgaaatgttcctgcaagattggctgcagaaaatagcgccatccgtattcttctccaaaaaaagcagaaaatacaaggaaaaagctgacgaataaggaaatcagagacatccagaacattggggtattcaaaagaccaagaaacgcttggatatttcccgctgcaaaactggaaatcaaaaggttagcgataaacagcataaaaaacagaaggacatacaaaaagtgctttctgctgtcagggccggaccaggtcagcccccagatgaatcggatttctcgtttgtcgagaagaaataagacccagagtgccagattcccggcaattgtgagcatactgagtacgaaagtccaattgatctccggaaacagtatactgcagaaagaactgagagcaaacagtatggtcaatacaaggtatccgtagaaaaaacgccggggcatcggaaattctgtttttgtcagaagaaagacgacgattgctccggcagccggatagtacatctgagcgtttgcgaagaaatccagagaatatcctttttgatatccgaatgccattggaatccccattagataaggaattccgatagcgatgagagagaaaatcagcaattgttttttctccagctgagtaaatgagcgtttcataatataatctcctttgtaaagtatagtattaaatcttcagcatgggctgtttatattcatttcgaaaagcggtcttatatttatccgtgatcacggattgatacagattggatgctaaaatgtcgtgccggagcattttctgaccgatttcggagatactgtcagtatcagagagccgggtgagcagcggcagagagctttgagcagcgatggaggaaagcagatcctggctgtcttttcgaaagcctagaagttttgcataaaaatgacctccattttccatatattcgcgcacattgttttttttcagaccgagcataatatgcagaagcgcacgattgatccgggtttgcgtcagttcttttgtttttaacaattcacaaaattgtttataattaaagaagtcattcaggttgttctggatgcggttggcaagcgtttcagagacatccatatagcggataagactctgaggagttttattcaaaagcttgtacttcatcagaagcgaaaaatcgttctggtagacgggatataagactctgtgataatcttttaaaagcgtcaggcacatctgtggaacctggtcttccaactcatttaaaatactggaaaacggtgtattttcaaaagtctcgccggcaacctgctgtgtttggagcacagaacttgaatatgcaaggagagaacggatggcagaggcagagctgtaggtcgaacgcagtgtctgatcgtgatagtcggattccatacgtttgattgtgaaaggttggattttgctgtttacacgacgcaaagcttttaaatactcgatccccaggatattgtttggatcgttcaataaaaaggagcagtcccaacctcccatataagatgccaaagccttctgtcttgctgctggaaatgacatgccggcgcgtaagttttgtttgagagaacgggcatattcttccggttcgttatagaggatgtcagcaattttagtcaatccgtcaaggtcattgcattcacttccgaaacagagacaatctaccacaccaagccgatctaaaaaagagacagcgccgagtgcaaataattccgcagtggcagttgcgtagcagaccggaagctcaaatacagcagaagcattgcattttaaggccatttctgcacgcagtcgtttgggcatgatggcaggggtgccgcgctgcacatagtctccgctcattacaacaatagcagcatcggcgccggttatctccagggatttacggatgtgatactggtggccgttgtgaaaagggttatattctgtgattaaaccgacaattttcataaaaatctccttgtatatcattttattacctattatactataaaagaacggcaagaacaaatcaaaagaggtggatgtgatatggaatacgatgtattgttatcaatgctggagaagcgggaatttaaagaattaaaagatgaattggagaacatgcaccccgtagatattgtggaaatgctggaagacggactggaatatgggaagattgacaagcgtcagatgacgctgcttttcagattgcttgcaaaagaagaggcggcagaagtctttacagacatgacgagcgatactcgagaggtgctcatcaatgcactgacagattccgagttggaagaagtcatggaagaaatgtatgtggatgataccgtagatgttctggaagagatgccggccaatgtagtagacagactgctgatggcgacagatgaagagacccgtcagaagatcaacgcacttttgaagtatccggaggacagtgcgggcagtattatgaacattgactatatcagtctgaataaggagatgacagtggcagatgccatattgaagatccgacaggttggtatcaacaaagaaacgatctacacgtgttatgtaacggaaaagaaaaaactgatcggagttgtggatgtaaaagatatactcacttccggagagtccagaacgatagaagaaatcatggatgagaacgtgatctatgcaaagacactggatgaccaggaagaagtggcggagacgattcgaaaatatggtctgatcgccatcccgatcattgatcacgaaatgtgtatggtcggaattgtaacagttgatgatgcgatgttcgtgttgcaggatgaagcgacagaggatatcagtattatggccggtgtcagtccaagtgaaggatcttatttcggaacctctgtatttcgtcatgcaaaaaatcgaagtctctggctgatgctcctgatgctttctgcaactgtgacgggagaaattctgggacgatatgagagcgcaatggcagtaatgccggtattgatcacgtttattccaatgctgatgggaacaggaggaaactgtggttctcagagctcgacactggtgattcgggggattgcagtgggtgagattgagtttaaagatattttccgcgttatttttaaagaaatacggattgcactcgtagtcagtctgattctggctatggtcaatggactgcggatctatattatgtatgacagggatgtgatgctggcggttgcaattggaattacaatggtggcagttgtagttatggctaagacgataggatgcgtccttccgctggtcgctaagaagattggcctggatccggcaatcatggcagcacctttgattacaacgattttggatacgtgcacgattttagtttatttccggattgtgacgacgtttttccatatttgaaaaatattgatagaaaaaaaacgatgtataacaggactttttagagtgaactctgagaagtcctgttttttcttggaaaaatgaagaagtttgaaggaaataaagggaatggtcgttaaatatttgacaatataactgaaaatggtcagaaaaaaagaaagattgtacttaaaaatgcacataagagctacttgtatacaaaatctatttgcgttataataaaacaagtgaaacaaatgaaaggggctttaaacaatggcatttattgatgaaattaaagcaagagcaaaagctgacaaaaagacaattgttcttcctgagacagaagacgtaagaacttatcaggctgcagaggcggttttaaaagagggaactgctgacctgatccttgtgggaaacaaggaagaaattgaaaagaacggagctggatttgatctgacaggtgccgtgatcgtagatcctgctacaagcgacaagacagaaagctatatcgcaaagctggtagaactcagacagaaaaaaggaatgacagaagaacaggcaagagagattcttctgacaaactatctgtactatggtgtcatgatggtgaagatgggggatgctgatggtatggtatccggagcatgtcactctacagcagacacacttcgtccttgtctgcagattctgaagacaaaaccgggaacgaaattagtgtccgcgttctttgtaatggtagttccagattgcgacatgggtgcagatggtacatttattttcggagattccggactggagcagaatccagaccctgaaaaacttgcaaacattgcactttcttcagcagaatctttcagaactctgacaggaaaagagccggttgtggcaatgctttctcattctacaaagggaagcgcaaaacatgccgatgttgataaggttgtagaggctacaaagcttgcaaaagagatggctccggaattgaaactggatggagaactgcagcttgatgcagcaatcgttccgtctgtaggagaatccaaggcaccgggaagtccggttgcaggacatgcgaatgttttgatcttcccggatctggatgcggggaatatcggatataagcttgtgcaaagactggcaaaagcagaagcatatggacctttgactcagggaatcgcagcaccggtaaatgatctgtctcgtggatgcagcgcagaagacatcgaaggtgttgtggcaatcacagcagtacaggctcaggctcagtaattgtttagagaactcaaaatcggggataaataaaataacaaattttcaggaggcaaaaaatgaacgtattagtaatcaactgtggaagttcttctttgaaattccagctgatcaatgcagaatctgaagaggttctggcaaaaggaatctgtgaaagaatcggaattgacggacgtctgacatatcagccagaaggcggggaaaaagaaaaatcagacaaagcaatgccgactcacacagaagcaattcagtttgtaatcgaagcgctgacaaatcctgagacaggtgttgtaaacagcctggatgagatcggggcagtcggacatcgtatggtacacggtggagaaaaatttgcttcttctgtagtgattacagatgaagtgaaaaaagcagtagaagagtgtaatgatcttgcaccgcttcataatcctgcaaacctgatcggagttgcggcatgtgaaaaattgatgccaaatacaccgatggtagcggtatttgatacagcatttcatcagacaatgccaccgaaagcatatatgtatggacttccatatgagtactatgaaaaatacaaagtaagacgttatggtttccacggaacaagccatagctttgtttccaagagagcggcagaactccttggaaaaccatatgatgagacgaagacaatcgtatgtcaccttggaaacggatccagtgtgacagctgtattaaatggaaaatctgtagatacatctatgggattgactccattagaaggtcttgtaatgggaacacgctgcggagacattgatcctgcgatcatggaattcttggcacacaaactggatctggatgttgacggtgtgatgaagattttgaacaaagattccggagtgtatggactttcaggcggactttccagtgatttccgtgatttaacagatgcttctttagcaggagataaaaaggcacaggttgcaatggaagtattctcttacagagttgcaaaatatatcggagcatatgtagctgccatgaatggtgtagatgatatcgtatttacagccggaatcggtgaaaatgatgatattgtaagaagacaggtatgcagctaccttggctaccttggaattgagttcaatgatgagcttaacacaggattgagaggaaaggaagtagaactttctcagccgggatccaaagtaaaagtttttgtaattcctacaaatgaagagcttgcaattgcacgtgaaacactggcgctggtacgcaaataagtttctgaaaattttgagaatcaacagggttgcccgtaaaagcggacagcccttttcagcggaacagggtgaaaagcataaaatgtaaaaatcttgttgacaaataggattaacatgatataatagtttaggtatgaataggagtaataattatgttaattaacctatcagacgttttgtcagaacagcataagacagtcgatgagacagtacagttggaaatggatacatttcagtcaaaactgggagattttccgattgtaggcaaagagccggttcatgttgttgtggaacatataaaaggcagagaacttctgattcgtgtggagacgcagatttgtattttgatcccatgcgacagatgccttgaggatgtgaaacaggagtttgatctggattttacaaagcatgtggatttgagtgtatcagatgctgatctgagagaagaattagatgaatcaaacttcataagcggatatcatcttgacgtggacaaaatgctctataatgagatattgataggatggccgacgaaagttctatgcagtgaagactgtaagggcatttgcaacgtttgtggtcagaacctaaatatgggtacctgtaactgtgaagatacagctcttgacccaagaatgtcagttgtccgtgatttgtttaagaattttaaggaggtgtaacctatgtctatctgtccaaagaacaaatcttctaaagcaagaagagataagagaagagctaactggaagatgagcgctccaaacctggtgaaatgcagcaaatgtggtgagcttatgatgcctcacagagtatgcaaagcatgtggagcatacaacaaacgtgaaatcgtttcagttgactaattaaaaatgagattaaagaatggggactttgtaaaaagtctccatttttcatattcaaaaatcagccttttatattgatttttgagatgatgtttagtagaatgtatgcagtagcgttaggaggaagagaaatgtctgatattacaaaagttgcgctggatgctatggggggagaccatgcccctgcagagatggtaaaaggtgcagtcgaggctgtgaataaaagagaggatattaagattctgcttacaggtcaggaagaactgctgagaaatgcattgtcagaatatacttacccgaaagaacggattgagattattccggcatcagaggtgatagaaactgcagaaccaccggttatggcaattcgaagaaagaaagactcttcgatcgtagtagggatgaatcttgtgaaaaaaggagaagcggatgcatttgtatctgcagggagctccggggcaattcttgttggagggcaggtgatcgttggaaggatcaaaggcgtagaaagaccgccgcttgcaccattgattccgacgatgaagggggtttctctcctgatcgactgtggggctaatgtagatgcaagaccgtctcatctggtacagtttgcaaaaatgggatccatttatatggagcacgttgtaggaaaaaagaatccgacagtcggaattgtgaatatcggggcagaagaggaaaaaggaaacgcacttgtaaaagagacatttccacttttaaaagcttgtaaggatattaattttatcggcagtgtggaagcaagggatattccgtacggagctgcggatgtgattgtttcagaagcatttgtcggaaacgtgatcctgaagctgtatgaaggtgttggcggagctttgacgaagaaaattaaagcgggtatgctgacatctctgcggagcaagatcggtgcacttcttgtgaagcctgcgctgaaagctacattaaaggattttgatgccagcgagtacggaggagctcctctgttggggttaaatggactggttgtcaagactcatggaagttctacttcgaaagaagtatgcaattcaatcatccagtgtgtgacgtttaaaaatcagcagattaacgaaaagattcgtgaatcgattcagtccacacaggaagaaaaaaaagaagattaaagggaaaaggaaaggaagaaaactatggaatttgaaaaattacaggatattatcgcagacgtgttgaatgtttcgaaagatgacattcatccggagaccacatttgtggatgatttgggagctgactcactggacattttccagattatcatgggaattgaggaagaattcgatattgagattgataatgatgaagcggaaaagatttcaacagtgcaggatgcagtagaccagatcaaaaaagtagtagaataaaaagtcgggaagagatgtttgtttctgaccctggggttgggtgcgtgattctgtcgcgcacccaaactgtattatgcaggtcagaatcaaaaaatatgaataaagggaaaagtatgaagaaacatttaaaagagctggaaaaaaagatcggatatgaattccagaatttttcgttgttggaacaggcaatgatgcatagttcttatacgaatgaaaaacatttggagaagtaccattgtaatgagagactggagtttttgggagatgcggttctggagttggtgtccagtgaatttttgtttttggaatcaccaaaagtatcagaaggaaagctgacgaagacaagagccagtatggtatgtgaaccgtctcttgcattttgtgcaagagagattaatttggggagctatttgcttcttggaaagggagaagaagcaactggtgggcggcaaagaccttctgttacttcagatgcgatggaagcattgattggagcgatttatctggacggtggttttactaatgcaaaagagtttattcatcgatttatccttacggatctggagaataaaaaactcttttatgatagcaagactattttgcaggagatcgtacaagcggatatggaagaaggaatttcctatcatttgatcaaagaagagggtccggatcacaacaaatcttttacagtagaagtgcagatcggagagactgtttatgggacaggaaacgggcgtacaaagaaagcagcagaacaggaggccgcttacaaggcaatcctgaagctgaaaaaacagaactagagcgggtgttttatgtatttaaaatgtattgaagtacaggggtttaagtcctttgccaatcggatcaaatttgaatttcataatgggatcacaggaatcgtaggtcccaatggaagcggaaagagtaatgtcgcggatgcgatccgttgggtgttgggagagcagagagccaaacagctccgtggcggttccatgcaggatgttattttttcaggaacagaaaacagaaaaccgttgagttatgcttctgtagcaattacgctggataattcggatcatcagttgcccgtagattatgcagaagtgacagtgacaagaaagttgtatcgttctggggagagtgagtatctgattaatggaacggggtgcaggctgaaagatatcaacgaaatgttttatgataccggtattggaaaagagggatattctattatcggtcaggggcagattgacaagattttaagtggaaaaccggaagagagaagggaattgtttgatgaggcagccgggattgtaaaattcaagcgccgcaagaatctttcgttaaaaaaactagaagaagaacagagcaatctggtcagagtcaacgatattctttccgaactggaaaaacagattgggccgctggaaaagcaagcgacagtggcaaaagaatatctgaaaaagaaagaagaactaaaagtttatgatatccatatgtttcttttagaggcagaacgtttgaaaaagcagctgaaggaactggaggagaaacttggtattgcagctgatgagatggagcgtgcaaaaatccgttatgaagaaacaaaggatcaatatcaggctgtagaaaggcagacagaagaaatggatgccgcgatcgagaaattgaagtctcagttgaatgagacaactcttttaaagcagcagctggaaggacagattaatgttttaaaggagcagatcaatacagccaggatcaatgaagagcattatgagaatcgtcgtcgtacgattcaggatgaatggaagaataagaaggaagaaaaagagggatttatagaggagagtgaaaaaatccacatacaactcgagcagatatccatccgtgatgcggaagcaaaagaacagttgatttttgtacagtcacagattgctgaagaaacgatggagattgagcaaagcaaggaagaaattatgcagcttttgaacaatcgggcatctactcaggccaaaatccagcattttgatacgacccaacagcagattacaaccagaagagcacaggttcacagagaaattctggaagtatccagtgaggcacaacagtatgatcgggaattgaaactgaaaaggcaggaattggaaaatattacaagacagattcaatcgtttcaggaacagatcaaagagaatgaacagaagattgtcggactgcagcagcagttgaatgaaaagcaggaaaaattgcgaattggtcagaccgcttatcacagagagtcctcccgattggagtctttaaaaaatattacggaacgatatgatggatatgggaacagtatccgtcgtgttatgagctgcaaagagaaagaaaaaggcctgatcggtgttgtggcagacattttcaaagtagacaaagaatatgagattgcaattgaaacggctttgggaggcagtattcaaaatattgtaacagaggatgaagagactgcgaagcgcatgattgtatatctgaagcagaacaaatatgggcgtgcgacatttttgccgctgactagtatgcagggtggttctgaactacgtcagccagaggcgttaaacgagccaggcgtgatcgggttggcacatacactggtgcatgtggaaaagagatttctgggactggcaagacagctgcttggcaggacgatcgtagtagaaaacatagactgtggaatccgtattgcaagaaaatatagacaatcgctgcgtctggtcacgttggaaggagaattgatcaatcctggaggctctatgactggaggggcttttaaaaattccagcaatctgctgagcaggcgcagagaagttgaggaatttgaaaagacagtcggcatgttgaaacaggatatggaagagatggagcatgcagtcagcaggatcaaagcacagagggcagagcattatgcagaaatcgatgaaattcagcagaagattacagaagcgtctgtatgccagaacacagcgcagatgcatgtagagcaagtgcaaaagcagaaggaggaatccagacagcactgcgaggagtatgcagcagaacaggaagaactggaacggtcattgcaggaaattcgtgaaaatggagagtcgattcaggtagagctggaagcatcgaaagagttggaaaatgcgttaaatcaaaaaattgaagaattgcaggtacaattggaacatcatcgcaaagcagaagccgtgcaattaaaacagtcggaagaagtgcatttgtcactggcggggcttcagcaacaggatctttttgtaaaagaaaatatcgcacgtgtcgatcaggagatgatacgcctggagagagaaacagacgaactgaatcagaacactggaaataccgctgacgaaatcagccagagggaagaaaagatccggagtctggtacagacgattgaagaatctgcagaaatttttgcggatattgaagcagaaatcagggagcgtacagaagaaaaggaaaagttaaataaaaagcataaagcatctctggaacagagagagacgttgtcccggcacatggcagagctggacaaagagctattccggcttgaaagtcagaaaacggactgcgaggaagcagctgaaaaacagatgaactatatgtgggaagaatatgagattacctacaacagtgctttgaagctgcgggatgagacactgacagaccgggcgtttatgaaaaaacagattcagtttttaaaaggagagatccgcaaactgggaaatgtcaatgtgaatgcgatcgaggattataaacaggtatccgagaggtatgaatttttgaaagaacagcatgaagatctggtggaggcgaaagaaacgctgatacagatcattgcagagctggatgcggcaatgcgtgcccagtttgaagaacagtttgccagaatttccagggaatttgattctgtattcaaacagttattcggtggcggaaagggaacgctggagctgatggaagatgaggatattctggaagcagggataagaatcattgcacagccgccggggaaaaagctgcagaatatgatgcagctctctggtggggaaaaggctctgacagcaatttcactgttatttgcaatccagaacctcaaaccgtctccattctgtcttttggatgagatcgaggcggcgttggatgacagcaatgtagaccggtttgcgcagtatctgcacaaactgacaaaacatacacaatttatcgtgattacccacagaaggggaacgatgacagcagcagacagactgtatggtatcaccatgcaggaaaaaggagtttccacactggtatctgtagatctgttagaggaagatctgacttgatgccagtaacataaaggagaatatatggaagagaaaaagggattttttagacggcttgtttcggggcttacaaagacaagagataatattgtgtccggaatggacagtatttttcacggattttccaagattgatgaagacttctatgaggaattggaagaaactctgatcatgggagatttgggagtacatacgaccatggagatcatagaagatctccgccagaaagtcaaagagcagcacatcaaagagccgatggcctgcagacagcttttgatcgacagtatcaaagaacagatgaatgtgggagagactgcatatgagtttgaggagaaacagtcggttgtattcgtgatcggggtcaatggagtggggaagacaacaaccattggaaaactggcgggaaaatttagagatcagcataaaaaagtaatcctggcagcagcggacactttccgtgcagcagcaggagaacagttgaaagaatgggcaaaccgtgctgaagtagagatgatcggaggtcaggaaggcgcagatccggcatccgttgtgttcgatgcggtggcggcagcgcgtgcaagaaaagcagacattttattgtgtgacacggcaggacgtcttcataataaaaagaatctgatggaagagctgaaaaagatcaatcgggtgatcgaccgggaatatccggaggcctacagagagacacttgttgttctggatgcaactaccgggcagaatgcactggcgcaggcaaaggagtttaacgaagtagcagatatcaccggtgtgattctgacaaagatggatggaacagccaagggaggaatcgcagtagcaattcaggcagaacttggaattccggtcaaatatatcggggttggagaatccattgatgatctgcagaaatttgatgccgatgaatttgtcaatgcactgttttatagtgatacccaaaaagaagaaaccgaagaataaaatacgtcaaaaagacagaaagagggatggaagatgttgactttggagaaatttgaagaagcaagcgaagtagtgaaacaggtgacgactccgacaaaactggtgtacagtgaatacctgagtgcccagacgggaggcaaggtttatctgaaaccggaaaatatgcagcatacaggtgcgtataagctgaggggcgcctactacaagatcagtacattatcagaagaagacagaaacaaaggtctgatcactgcatctgcgggaaatcatgcacaaggtgttgcatatgcggcaaagcgatatggatgtaaggcaaccatcgtaatgccgacaggaacgcctttgatcaaagtgaaccgtacaaagagttatggtgcggaagtgatcctttacggagatgtttatgatgacgcctgcgcatatgcatatcagcttgcagaagaacatggctatacgtttgtccatccttttgatgatctggatgtggcaaccggacaggggtcgattgcaatggagattattcaggagcttcctacggtggattacattttggttccaattggtggaggtggactgatcacgggagtggcaactcttgccaagatgttgaatcccaagattaaggtgattggggttgagccaagagaagcggcgagtatgacagctgccctaaaggccggagaagtggtggaattgccaagtgccaatacgattgcggacggtactgcagtaaaggcagtcggaaaacagaatctgccgtatgtacagaaatatgtagatcagattcttctggtagatgatgatgaattggtcggcgcatttctggatatggtagaaaatcataagatgatcgtagaaaattccggacttttgtcagtggctgcattgaaacagctggatttaaaagggaaaaaggcagtctgtgtattaagcggtggaaatatggacgtcattaccatgtcttctattgtgcagcacggactgatccagagagaccgtattttctctgtcgcagtacttcttccggataagccgggtgaactggtcagagtggcatcgatcattgccaatgaaaagggaaatgtcatcaaactggaacataatcagtttgtcagcaccaaccggaatgcggctgtggaacttcgtattacaatggaagcatttggaacagagcataagcacaagattcttaatgcgttaaaagaagcagggtatgagccgaaaaaagttggagcgaagctttattaagagaatatagggaaaacgaaagtgtccggatgacctgataatgagggttattcggatatttttgcaggagtgttttcagaggggatgagaagtaaatgtacttagtatcgatgtattttgatgaaaaatcagcatgtcgaattcagggatacataaaccagactgcaaagaaaagtggaaatctatttataacagagaaaaaggtgccgccacatatgaccatttctgcatttgagacgcaaaatgcagatcaggtgatctcactattgagagaaagggtagatatgtttcaaagaggagaaattatctggtgttctgtgggagctttttttccgtatgtgctgtatctttcaccggttttcaatacatatctgcaagaactatcagagaacatttatcaggagctgataaaaatagaaaagattaagatacataaatgttatcgtccgatgcaatgggttccccatgcaacgattggaaagaaactttctaaagaggagatggttgcagcatttcaggtgctgcaggaacagtttggaatgttcagcagtcaggtggtgcggattggcttggcaaaaacaaatccatatgaagagttgtggagcatagaactctgaaaatatttgagcaaaaatcaggtagaaaaaactccggaaagatgttagagattctttccggagtctgttttttatacctgatgatatttctgaagcaatttgtgaatcttgtctgtcggattcataacagctccgatcgtcagatcgtgattcagagaatcaatgatcagggccaggaatttactcatatcagccttgacgaaatattctctctcatccacggccggtggaagataggtcaggttggttgttacaactttatcgatataccctttttgatagtattcatcgaatttttcaaatccgtctgtgaacagtccgaatgtggtgcatacgaatacgcgtgctgcattgcggtcttttaattttttggcaacgtccagcatactttctcctgaggagatcatatcgtctacaatgatcacatctttgcctgctacatcatccccgaggaattcatgtgccacgatcggattttttccatttacgatggtagagtagtctcttcttttatagaacatacccatatccactccaagtacgttggagaagtatacagcacggtgcattgcgccttcatccgggctgacgatcatcagatgatctttgctcactttcaaatctggaacagcgcggaacagtgctttcataaactgatactgtggagtgaagttatcaaatccacttaacgggattgcattttgtacacgtggatcatgtgcgtcaaatgtgagaatgtttgcaactcccatgtcgtttaattcttctaatgccagagcgcagtccagagattctctttttgttctcttgtgttgccggctttcgtagaggaatggcatgatgacattgacacggtgtgcttttccggtagatgcggcaatgatacgtttgatatcctgaaaatgatcatctggtgacatatgattgagatgtccgttgacagaatatgtaagactgtagttgcatacatcggccatgataaaaaggtcagttccacggatggtctctttgatcacacctttcgcttctccgcttccgaaacgaggacaattacactctaccagataattgtttgtgcggtagttcacatacaacggggattctgttacttcgttaattgtgttctcacggaaagatacgatgtaatcgttgactttttgtgccagttctttgcagctttccaatgctgcaagtttcaatggagcaactggaagggttttttccaataattcaatatttgccatgattttctcctgtgtttttgtttttccatattcgacattcgaatataagattccatatatggttatatcattttttatagggaaattcaagcatggctttgctatagaggaaaattatgctatacttgtactgttaacatgccgaaagtatgagcagacagaggttttgttttctggcagacagaggacaaactttggaaatataagaaaacaaggagtttgaatatgaaaaagcacgagcatattgtaaaatctctggtgcctggcgggattggagaagagatgggaattgaacccggggataaactgcttgccattaatgggaatgagatacaggatgtatttgactattactattatgaagagagtgaggaactgcttcttctgattgaaaaacaggatggagagcagtgggaactggaaattgaaaaagaggaggatgaaagtctcgggattacatttgatcagagtctgatggatgagtaccgttcttgcaggaataagtgcatgttttgctttattgatcagatgcccaaggggatgcgggatacactgtactttaaggatgacgattccagattatcatttttgcagggaaattatattacgctgacgaatatgagtgaccatgatgtggagcgaatcgtaaaatatcgtctggaaccgatcaatatttcgtttcagacgaccaatccggaacttcgctgcaaaatgctgcataatcggttcgccggagatgcactaaaaaaagtggacatcctctaccaaggacagattgagatgaacggacagatcgttctttgtaaaggagtcaatgacggagcagaactggaacgtactattcaggatctgacagggtatcttccttatttgaaaagtgtttccattgttccggtaggactgacaaaatatcgtgatggattgtatcctttggaaccatttacaaaagaagatgcaaaggaagttctttctgtggttcaccgctggcaggacaaaatctatcaggaacatggagtgcatatgatccatgcaggcgatgaatggtatgtgctggcagatgaagatgtgccggaggaagaacggtatgacggatatcttcagctggaaaatggtgtgggaatgatgcgacttctgtttaatgaagtgcaggaggcactttctgctgtaaccggggatgcgagacagcgggaaatttccctggcaaccggacagctgatgtatccgtatatcgggaagattctggaagagatcaaaaagaaatttccgaatatcatcacacatttatatgccattcgcaatgacttctttggagagaggattaccgtatccggtctgatcacagggcaggatctgcttggacagttgaaaggccagccattgggagagaggctcctgctgccttgtaacatgctgaagatcggggaaccggtctttctggatgattttacgctggaggaagtggagaattctttacaagtgaagacagatattgtaaaatcaagcggacaggatctgttggatgcagtgcttggctcttatgagaatgaagatttgagcacagatagaagaagaggcagatttcaggaaatgtaaagattgaatggagagaaaggtagttaaaaatatgagtaaaccagttgtagccattgtaggaagaccaaatgtgggaaaatctacattgtttaatacattagccggggagcggatatcgattgtaaaagatactccgggtgtgaccagagaccgtatatatgcagatgtgtcatggttagataaagaatttaccatgatcgataccggtggaatcgagccggacagcagtgatattattttgtcacagatgagagaacaggcacagatcgccattgatacagcggatgtgatcgtatttattacagatgtgcgtcaggggcttgtagatgcagactccaaagtggcagatatgctcagacgatcccaaaaaccggtggtgcttgttgtcaacaaggtagacaattttgaaaaatttatgccggacgtgtatgaattttataatcttggaatcggtgatccggttccgatttccgcagcatccagacttggaatcggtgatcttctggatgaagtggtctctcatttcccggaaggagccggagcagaagaggaagatgaaagaccaaagattgcgattgtcggaaaaccaaatgtgggaaaatcttcaattgtcaataaactgcttggagaaaacagggtaatcgtgtctgatatcgcgggaactacaagagatgctattgatactgcgatcaaacacgatgacagagaatatattttcattgacacagcgggacttcgaagaaaaaataagatcaaagaagagctggaacgatttagtattatccgtacagtgactgctgtagagagagcagatgtggtgttgatggtaatcgatgctacggaaggcgttacagagcaggatgcaaagattgccgggattgcgcatgaacggggaaaaggagtgatcatcgttgtcaacaaatgggatgcgattgagaaaaacgacaagacgatgaagaaatacgagaatgatatccgtactacgctttcttatatgccatatgcagaaattatgtatgtttctgcaaaaacagggcagcgtctgaataaactgtatgatatgattgatatggttattgacagtcagacccttcgtattcagacaggggtgctcaatgaaattatgatggaagccgttgcgatgcagcagccgccgtcagacaaaggaaaacgtctgaaattatattatataacacaggtatcggtcaaaccgccgacattcgtgatttttgtaaacgacaaagaactgatgcatttttcttatacgcggtatctggaaaataaaatccgggaagcgtttggatttagaggaacttctttgaaattctttatccgtgagagaaaggaaaaggatcagtaggtatggaacgaatcatctgtcttatcattggatatgtgttcggtctgtttcagacgggatattttgtaggaaaactgaatcatgtggacatcagaaaagcgggaagtggcaattccggctccaccaatgcactgcgtgtgcttggagtaaaggcaggtctgatgacatttgcaggagatgttttaaaatgtgtgttggcaattctccttgtacggcagattttcagcaacagtgtataccttccgctgcttgcaatgtatacgggagcgggtgtgacactgggacataattatccgttttatctgaaatttaaaggtggaaagggaattgcagtgctggcaggtcttgtgatttctacaaagctttggatggcaccgattcctttggctgcatttatttttgtagtggcgattacgcgttatgtttctgtgggatcccttcttgtaacggtgatctttcttgcagaagtcatatttttcgggcagacaggcggatttgcgatggcgcagtcttatgtatacgagctgtatctggttacatttttattgatggcactggcatggtggagacaccgtgcgaatataaaacgactgttcaatggaacagagaataagatcggagcttctaaaaaatagaaacgatcaaaaaggaggcagaatatggcaaatgtaggtgtgttgggagcaggaagctgggggacagcgctttcggtgcttcttcatgacaatggaaatcaggtgacgatctggtctatcgatccttgtgaagtggagatgctgtccaaggacagagagcataagaaaaaacttccgggagtgatgatttctgaggaaattaagatcacgggagaattaaaagaggcaattttagagaaagattttcttgttctggcagttccgtccccgtttacaagagcaacggcgagaaaaatgcagccatttgtgacagaaggacagatcattgtagatgtggcaaaaggaattgaagaaacgacattgatgacgctttccgagcagatcaaagaagaaatcccccaggctgatgtggcggttctttccggaccgagtcatgcagaagaagtgggaagaaaactgcctacgacatgtgtggtcggcgcagcaacaagaaaaacagcagaatatctgcagtccgcttttatgagtaaagtgttccgtgtgtatacaagtccggatatccggggaattgaattgggcggttccctgaaaaatgtcattgctctggcagcaggaattgcagatggtcttggatatggtgacaacacgaaagcggcattgattaccagaggaattgcagagattgcacgtcttggagtgaagatgggcggcaagctcgagacatttaccggtcttacaggaatcggtgatctgatcgtcacttgtgcgagtgtacacagccgaaaccgcagagccggataccttatgggacagggcaagacgatgcaggaagcgatggatgaagtccagatggtggtggaaggcgtatattctgcgaaagcagccagaaaactggcagagaagtacggtgtttccatgccgatcgtggagcagatcaaccaggtgttattcgaaaataagagcgcggcacaggcggtggatgagttgatgctgcgggagtcgaaaagtgaacattccgtattgccgtggccggatgagcaggatactctgtaattcaatatcatttgaagacaatttcagaaaagcacaatggaataatcccctttgtttttgcatagattggtatcagcagaacaagggggtattttttatggatgcatttcaggtatacaaagatatgaaggcaaggacgaatggggaaatctatattggagtcgtaggtccggttcggacaggcaagtcaacgtttatcaaacggtttatggatcttcttgtattgcccaatatgacagatgaacatgcaaaagaacgaaccaaagatgagcttccgcaatcagcatctggaactacgatcatgacaacagagcccaaatttgtgcccaaggatgcagcaactgttcggctttccgaggatgtagaagtgaagatccgcctgatcgactgtgtgggatatatggtggaaggagcaggcggacatatagaaaatgatatggaacgtcaggtaaagacgccctggtttgagcatgaaattccattcacaaaggcagccgccatcggaacgcagaaggtgatccatgaccatgcaacaatcggactggtcatcacaacagatgggagtattggagaacttccaagggaaaattatatttccgcggaagaaaaaacagtgcaggaattaaaatccattgggaaaccatttttaatccttctgaatacacaaaaaccttatagtgaagaaacacaaaatctgcgggaaaggatgcaggaaaaatatggagtttctgtactttccgtcaattgtgcacagcttcggacagaagatatccaccagattatgcggcaggtgctgtacgaatttccaatttcagaagtagaattttatattcctaaatgggtagagatgctgccaaaggaacatccggtcaaaagcgaagtgctctccagcgtcagaactctgttggatgagatggaagacatccggagtgtggcagaatcggttccggaaagtgccagccaatacatagagaaaatcaggatatcccaaattgagatggatactggagttgtgaagatccagatagatctgaaggaaacgtattattatgaagtactcagcgagctgacaggaacaaccattcagagcgaatatgaattgattgccgcgatgaaagaacttgcggcaatgaaagaagaatatacacagatcaaggatgcatttgcagatgtgaagatgaaagggtatggagtagtcagtccgaagaaagcggaaatcttgttggatgaacctgtaataatcaagcagggaagcaagtacggtgtgaaaatccactcggaagccccgtctgtgcatatgatccgtgccaatatcgagacagaaatcgcacctattgtgggaagtgaaaaacaggcgcaggatcttgtggaatatatcaaagcagaaagtgagacgccagaaggaatctggggaacgaatatattcggaaaatcggtagaggaactggtaatggatgggatgcgcaacaagatcaatatgatcaatgaagaaagtcaggtaaagcttcaggatacgatgcagaagattgtaaatgacagcaatggaggtcttgtctgtattattatttgatttttttctcttttttctgctggatgcttggattctcattctcacatgtggtacaataaaacgacagagagttctctgattacagattttaagttgagactggagtacaagaaaggggtacgaatctatgaaagcggctatttttacgttagatacagaaagttataaagcaagaaaggccagtgcagcgggaatggtcttaaaaaaactgctggagcagtcaggatttgaaacggcggcagtgcgtgtgattccaaaagaccggaaagtggcggcatctgttctgaaaagagtggcacaggagcagacagcggagctggtttttacaacaggggcaaacggcccaatggagagtgattgtgcaccatatgcgctgatggatgtggcagagcgtctttttccgggaatcccggaaacgatccgtgcatttcgtaaccgcgattctctgcaggcagttctggattgcagtgcagcgggaatctgcaataagacattgatggtcaatctgccggaggatgcaaaagaggcaaaagaagtactggagtttcttcttccggaattaaagcgtgcagtagagatgttatgtgtatgatgcgggtgacatatctgggacacagtggtttttttctagagttggaggacgcccagtttttgtttgattataatacgggaggacttccgaaaatagatccggagaaaaagttgtttgtgtttgtaagccacaggcattacgatcattataatccggagattttaaatttaaaacggaagggtcttacgaacaggatatggtatcttttctcggaggatgttccggttccggatgaccaggaacaggtgataaggctggctgcggaagaagaaaaaacagtggaaggggtcagagtacgtgcattgccctctacagatgagggggtggcattctggatcgagtatcacggaaaagtgatctatcatgcaggtgatctgaactggtggcactgggaaggagagtcggagtcctataatacacagatgaaagtggattatcagaagtcgatcggaacacttcccgctcagccgattcatgtggcatttgtgccggcggatttaagactgggggagcaatatgtgtggggattggattactttatgcgccacacggataccatgcaggtgtttccaatgcatttctggggagaatatgaagtgtttgaccggttgatccaggaaccgtgcacagaagaatatcgaagcagaatccaaatgattcagaaagaaggacagatgtttgacattcaaagtcagacatagtataatgaaggacagtgttaagtaagacagacaatcgcggatgcatgtgccgaaaggccgcagacgaggaaagtccgggcttcgcagggcaggatgccggataacgtccggtggaggtgactccaaggccagtgcaacagaaataaaccgcctgtacaatgtacaggtaagggtggaaaggcagtgtaagagactaccgcccttctggtaacagaaggggcacatgtaaaccccatccgaagcaagaccgaataaaagctatgcggttgcccgccgcgctttaggtaggttgcttgaatctggcggtaacgtcaggtctagatagatgattgtccaatgacataacccggcttatcgttttgcttaatttgatgctgtcgctttgcggcagcattttgcatatcaacagagattttatacaaggtaggaaaagaatatgggaatgagaatcaatacaacactgcctcttccggcagaactgaaagcagaatatccgctttccaaagaattggcagaaatcaagaaaaaaagagacactgagatccgtgatatttttactggaaagtcggacaagtttgttgtgatcgtaggaccttgctcagcagataatgaagagtctgtatgtgaatacgtaaatcgtctggcgaaagtcaatgagaaagtatcagatcgtctgatgatcattccgcggatttatacgaacaaaccaagaaccacaggagaggggtacaaaggaatgcttcatcagccaagaccggatcaggcgccggatcttctggctgggatcattgcaatccgtaagatgcatattcgcgcaatttcagaaagtggtcttacaagtgcagacgaaatgttgtatccggagaacagaagttatctggatgatatcttatcttatgaagcaatcggcgcacgatctgtcgaaaatcagcagcacagactgactgccagcggcatggacatcccggtaggcatgaaaaatccgaccagcggggacttctctgtcatgctgaactcggtgatcgcagcacaaagttctcatacttttatttaccgggggatggatgtgaccacagatggtaatgatctggctcatgtgatcttgcgcggaggagtggataagtatggaacttgcaatccaaactatcactatgaagatctggtacgccttcagacaatgtatgaagaaaagcatctggtcaatccggctgctatcgtggatgcgaaccattcaaattccaataagcagttcaaagaacagattcgtattgtcagtgaagtactgcacagcaggaattataatacaaaattaaaagagctcatcaaaggtgtgatgatcgaaagttatctggaggaaggatgccagcgaatcggagcagatcaggtttatggaaagtcgattacagatccttgtcttggatgggaagatacagaacggctgatatataaaatagcagaagagtgctaggaaggaggcatttctgatgaagagacagatgcttggaaaaagtatgctggaagttccggcagttgcagcgggatgcatgcgcattcaggggatggacgagacggaagtggatgagtatatccacacctgtctggaactgggaatccagttttttgatcatgcagatatttatggaagaggtgcatgtgaatcgttgtttggccgagtattcgagcagacagagtttcgaagagaagatattattttgcagtctaaatgtggaatcgtaccgggtgtgatgtatgatttttcaaaagagcatatcttacagtctgtggaagaatctctccgcagactgcgtacagattatctggatattttgcttcttcacagaccagatgcactgatggaaccggaagaagttgcagaagcctttgatctcctggaagggtctggaaaagtcagacattttggtgtttccaatcatactccaatgcagattcagcttttgaaaaaatgtgtgagacaggatctgcttgtgaatcagctgcagttcagcattccattttcgaatatgatcgcatccggtttggaggcaaatatgcttacggacggcgctgtcaatcgtgataacagtgtgctggatttctgccgtctgaatgatatgacgatccaggcatggtctccgttccagtatggcttttttgacggggtatttattgacagtgaaaaatatccggaattaaatcagggattggcggatttggcagaaaagtatggtacgacaaaaacaggaattgcttcagcatggatattcagacatcctgcaaagattcagatggtggcaggtacgacgaatttgaaacgcctgagggagatcgctcttgcggcagatattcgactgaccagagaagaatggtatcagttatatttgagtgcagggcatatattgccttagtgtacagaaatcgaagatgcataaaaagcgggaatgggctgaaaaaccacattcccgcttttgtttatcttccggaatacttttcctcacagtatttacaacgatatacctggttttcttcatctgtcaggacaaagatgtgatccagttcctgttcgatggatgtgatacatcttggatttttgcagcgaatcacgttggtgatttcttttggcagtttcagaatttttttgtcaacgacttcttcattggaaatgatgttgaccgtgatattgtgatcgataaatccgaggatgtcaagatccataaaatcaatcggacattcgattttcataatatcttttttccccatcttactgctgcgggcatttttaatgatcgcaacacaacagtccaatttatcaaggtggagatatttgtaaatatccatactttttccagcttcgatatgatctaaaacaaaaccttcggaaatacgtcctacattcaatgtatttttcaaatcagataccttctttctttcatgaaataatttgtttgctattctacatggatatcaagcagtgtcaggatcagtgccatacgaacataaacaccatattgcacctgtctgaaataagctgctctcggatcatcatctacttccacagagatctcgtttacacgtggcagtgggtgcaggacatacatatcggaaggagcaagctgcattttctttttatccaggatatagaaatctttcatacgcacataatcttcctcgttgaagaagcgttctttttgtacgcgtgtcatgtacaggatatcgagctccggcatcgcatcctccaggcgaacgacttctttgtattcaatgtgatttcgatccagaacatcctgacggatataacttggaagacgcaattcttctggtgagattaaaacaaatcgaatgccctcgtaacgaaccagagcgtggatcaaagagtgtacggtgcgtccgaattttaaatctccgcaaagaccaattgtcatatgattcagacgtccttttacagaacggatggtcaaaagatccgttaatgtctgtgttggatgctgatgtcctccatcgcctgcattgataacgggaatagaagagtgcttgcaggcaaccatcggtgcaccttcttttggatgacgcatagcaacgatgtctgcataacaggagactgtccggattgtatcggaaacactctcgccttttgcggcagaacttgaatcggcggaagaaaatcccatgatacttcctccaagattgagcattgcagcctcatggcttaagcgtgtacgtgtacttggttcataaaacagcgtagccagtttttttccttcacaggcatgtgcatatttttcagggtgcttttcaatgtcccctgccagatctaacagtgtgtccagttcctctacagaaaaatcgagaggactcatcaaatgtctcatatgtaacctccttggcgatcagattttatttgaaaggataatctgatcatcgatattgtaataaatcttcaatagttttgcgttttggtgcaggcggatcgatgtccggatgtccaagtgcaatcagcgcagcaagttcccgctcaggaggaatatccagaaggttggagattccatcttcgtcaaatacacccataatgacagtacccagtccgcattcatgtgctgccaggcagaaagtctgacaggcgacaccgacgtcaaacatctgccagcgatcttttttggcggtggtataagaaccatcgcgctcaaaaccgcaccggcctttgatgtaagtgacggcaatcaaaaccggtgtctggcggatgatgtctgaattgtaagatggggtaaaatcatcagcaatctttcccagaagggaagaatcttcaattgcaatataacgagtaatctgagtgtttttccaggaaggggaaaaagaagctgctgaaacaatttcttcaatcagtgaatgttcaactggctccggtttaaatttgcggatacttctgcgatttttgatacaatcaattgtatgcatcccaatgtacctccctatgcaaaatctctcccataatcatatactaaactgtactttttttcaacagagaattgccgtagaatggaaagtacctagaattttttcaggcatttttcaaaaaacagacctgcagtaaaccaaaaaggtgcgtagtcgaggcgaatcacccccttgatgttgaattttgcatgactgtaatcccatggacagatacagtgcttttttaaaaatagtccggataaaaattctccggcaaagataaaaacagtataaatactgccgcgcagaaaggtattttttgtctttaatttctgggagagcggggagaaaatacatgccattccatagattggaaacatccagatggaggttcttcctgcaagtgtataatctttggagaaaaaggagtgaagtcctgtaaacaaaatttccatgcaccagccgagggtgccgcataaaataaattttttcttcataacaacagactgcccattttagagcggatttatgcagttagaaatcaggtattgtacaatcggaaaaaaatgtattataatacagcttaagtttgaaaggacaaggagagaagaaaaatggcgacattggaagaactcagagaaaagctggatgggattgatgatcagattgcaaaactgtacgaagagagaatgaaagtctgtgaagatgtcggaagatataaagtcaatgccgggcgaaaagtatttgacaggcaaagagaacatgaaaaactgttggatgtggcatccaaggtcagcggagaatttaataaaaaagggattcagcagttgtatgaacagctgatgagtatgagccgcaaactgcagtatcagttgcttgtggaggcaggagcgcttggacgactgccgtttattgagatgaaagacttcgataagcagaacgtacgtgtcgtatttcagggtgtggaaggtgcttacagtcaggcagctatgaaaaaatattttccggataatacaaacaattttcatgtggcaacatttcgggaagctatggaggcaattgaagagggggcagcagattttgcagttcttcctatagaaaattcttctgcaggggcggtcaatgaagtgtatgacctgttggtggaatttgaaaattacattgtaggagagacctttcttccaattgaaaatacattggcaggacttccgggcacagaattgtcccagattcaacgagtgtattccaaggcagaagcacttatgcagaccagccattttctggaaagctacagcgactggcagcagatcagtgtttccaatacagctgcagcagcaaaaaaagtgttgaaagagcaggatcattcacaggcggcagtatgcagtgcgtatgcagcagaggtatatgggctttcggtactggcagaagacatcaatgatgaaccgaacaatgtgacacgttttatcattgtgacaaatcaaaagatttttacgccgaatgcatccaagatcagcatttgctttgaacttccacatcagagtggatctctgtatcagattttgtctcattttatttataatgatctgaatatgacaaagatcgaatctcgtccggtggaaggcaagagctgggaatatcgcttttttgtagattttgaagggaatttagaacaggctggcgttaaaaatgcgatccgcggacttcgggaagaggcaagaaatctgaaaattctgggaaactattgattttatgaggaggaagaggaagatgcgtaccaacgaactgattttatataaggacatggaatatgaagaacttctttttgatatgacatttttgatggaacattatgagaatgaatattataatcaggaagatttaaaaggcttgtttttttcctgtgtgaatgagctgttggagctttccgagcagcatggattttttgggaatctctggcatacatttttgacgtttcttcttgcaaacggggaaaatgcatacagtacttcctgtgagatcacaggggaaacaaagggaagtttaaatcttgcagcagagcatgatttccagatcttcaaagagctgtttgactatgattttaccagacttatgcagacactggatggagaatgtttttctcttcttctgaattatgaaaatacgcaggatgacagaattgtttttaataaacggatccgggacagaatctgtaatttgagcagggaattggaacaggcagaagatgtacaggcatttaaaaagtgtgtgacaaagttttataaagaattcggagtgggaaaactgggactgcacaaagcatttcgggtggagcatacaaaagaaggaagagcagaaatcgttccgatcaccaatattgcacacgtacatctggatgatcttgtgggatatgaggcggaaaaacagaaactgatcgataatacaagagcatttgtagaagggagaagagcgaacaattgtctgttgtatggagatgccggaaccgggaaatcctcttctatcaaagcaattctgaatcagtactatgatcaggggcttcgtatgatcgaagtgtataagcatcagtttcaagatctgaatgaagtgattgctcagattaagaacagaaattataaatttattatttacatggatgatctttcttttgaagaatttgaaattgaatataagtatttgaaagcagtaatcgagggcggattagaaaaaaaaccagataatattctgatttatgcaacatccaacagaaggcacctggtgagagagacatttcgggacaaacaggatcgcgacgaagaactgcatacaaacgacactgtacaggaaaaactgtctcttgtggcaaggtttggtgtgaaaatttattttgcatcaccgcaaaaaaaagcattccaaaaaattgtaacagaattggcaaagcggaatcatatttccatgccagaagaagaacttcttttagaagtcaacaaatgggagttgagtcacggaggaatgtcgggaagaacagcacagcagttcatcgattatcttctgggcagagaagaaccgcaccaggcggaataagaaaaggaatttggtatggcaggaaaagcgaggatgtatcgtcgggtactgataggagtacttctgatgttgtgtgtaaatacagcatctggatgcaggcagcaagaaaaacagaaaatgacccccaaactgctaatggatgcagttgatcgaaacatgagagaagtcaattccgcatccagttcactggaaatagaagtggagttggaggatgtattggatcacaccagaatccggatggatatggatatggagaatacggtcagtccaagagcagggcatgcgaaggggacagcagaagtaaaattgaatgagaatctggtttccagcaacatggaaatttatcaggtggaagaagaggacaagtatgtcacatacagcagtctttacaatcagtggacaagagctgagcaggaaaatcatgcttcttctggcgggacagaaacagatttcttccagagtgccagagcggaaattgaagatttcacactggcgggacagccggtaaaggtacaggaaaagtcctgttatgaaatatacggggatatgcaggggaaaaaattaatggattttcttggaaaagaaatgattcaggcatacggtcttgtcgatctgccggatcaaaatgcgctggatacactggaaattcccgttacagtagatatttataaaaaggagcagctgcccgcaaggatcattgtggatatgacagaagttatggatgaattgtaccagagctatgggaagaccaccaatgtgaatttttataatatcgaattggtctatcaagggtatgatgacgtaaaaccgattcaggttcctgagagtgtgaaacaagcagtcaatgggtaggaatgctctaataatcgtataaatcatatataaaggagaaaaaagtatgtttttattccgcaagaaagaaatggatattgctgcagcaaagcaattttggaaatggtttgttgaaaatgagcaatggatcatagataacgtgagcagcaatgggatggaagttgtttgggcaattgatgcacagataaaacctgtttttccatattttaaaaaagaacttgaatttcaattgggattcaatcatggtattggtgaatttttcttcttccattttggaaacaaaaatctgatctctgatgccaaaaaattagatgagcttatgccggaatctctccgtgaaaagtggtctttcatcatagaaaaatagttggatgcccttggtaacaaattttgtaccaagggcattttgcatacatcttaatcagaaaattctttcaagtgactgatgtcactgtcgatgatcagcgaataattcgtgtagtacacgacaaatccgggttttgctccctttggctttttgacatgttttttctcaatatagtcgatctctaccttttctccgccgcgggctttggaataataggcggcaagttttccggcttcttcaaaggtacggtccggaagctcctctccatttgtgcggacaacaacgtgagagccgggcgtgtttttcgcatggaaccaccagtcatttccgactgcaaattcaaaggtcagccagtcattctgaaagttgttctttccaacgtaaatatgatatccatcactggataaatagtgcagaggtttatttttgatctttacttttttcttcgtgaatttgcgccgcatgtatccggattggatcaattcttctttgatctctacaagatcgtcttcactgagtgcaatatccagagcattgctgacagactccagatagaggatatcttcctttgtttcttccgttaattcggacaaggcctcgaaagtgcgtttttgtttattgtatttttcaaaatagcgctgtgcattttccagaggagtctttgtggcatccaaaggaatttttatcatttcgttggtgtaataattcaaagcttccagtatttttgctccgggttccaggttgtatccatatgtatggatcaactctccgtataccttgtacttttcccggtcttctgtgtcagacagctgccgcatttgtaaggcgtattttttacgtgcacgatccagagctgtctgtacaatgtgacgcaagtctgcggatttctgacgaatgcgtgtaatttgatttttggttgcataataagtttccaatacataagaaatggaggaataagattctctttggtatgtgtgtaagtgttccagagcaagtgaagagaactcttttggttcttttccatcgtaataaatggatggggcaaagcttccttccttgactgcagagagataaatgcaaaattgattgtaaaagtgaatgcagacgtctgcagaaagttcggaagcaggaagtctggaatctacaccggagagaaaacaaatctcttcggcagtgaccgggctgatcccggtaaaactggtgtaaagtgctttggatacaggcattggttttgaacgaagcaaagtgtggaactgtgcctctgaaatcgtgaggggatctgctttttccatggtgtccggaataaaatagtcccgtccaggcagtacttcccgcacagaactcatctgagcagaaacgtgtttgatactgtcaatgatctttccatcgcaagtgcagaaaataatattgctgtgtttgcccatgatctccacgatcagatctttgcggcacaaatctcccagctcatcgagatgttcgatggtaaagtgaatgattcgttccagtttcggctgccagatatctacgatcctgccgtttgcaatatgttttctcaaaagcatacagaagttgggggcagtcatgggacttggtttgttcgtatccgtgagatatatcaatggaagagaggcactggcagaaatggaaagccgtctctgcccctgaggagatttgattgtcaacagaagctcgtctgcctcaggctgtgcgatttttgcaattcttccgtttaaaagctgttcttttaattcgtggaccagattggccacaacaattccatcaaaagccataaaaaaatcctttcttttggttggttttatttaacttgattattgtatcacagaatacaaagaagtggtaccggaaatcggaatttgtggagagggagcttgaccaaagcatatcagtcagagtatactggtaacagaatttcaagaaaataacagaggacaaagacatgataaaaagtatgacagggtttggacgatgcgaaattcaaaaagagtccagaaaatttacggtagagttaaagagtgtaaatcacagatatctggatgtgaatatccggatgccgaaaaagctgaatttttttgaaacagcgatccggacacttttaaaggagtatgccaaccggggaaaagtagacatttttatctcttacgaggatttgtctcagcagcagatgaatctaaagtacaatgcggcgctggcggcagaatatatgcgatattttcagcagatgagcgagacgtttcaaatagagaatgatgtaaaggtatcggcactttctcattatccggaggtgcttacgatggaagagcaggcagaggatgaagagattctctggagcggactcaaagaggcactggaaggcgcatttgaacagtttgttgagaccagaattctggaaggaacacatctaaaagaggatattttggagaaactttcaggaatggaaactctggtgggacaagtggagtcacgttctcctcagatcgtggcagagtatcgcacaaagttggaagagaaggtaaaggaactgctggcagatacacagattgaagaaaacagaattgcggcagaggtgattttgtttgcagataagatctgtacggatgaggaagttgttcgtttaaagagtcatatttcgcacatgcgtgataccctggaagagaaggaaggcattgggagaaagctggattttattgcacaggagatgaacagagaagcaaatactatcctgtcaaaggcaaatgatctggaagtgtcaaattatgctattggattaaagacagaaattgaaaagatcagagaacagattcagaatattgagtagtcaaaaggataaaggagaatttttttaagatgaaccagaaaggaattttgattgtcgtttccggattttcaggagctggaaaagggacattgatgaaagaattgttgaagcattatgaagatacatatgcgttgtcgatttccgccactacacgggatccgagagaaggagaagtggatggaagagagtattttttcaaaacaatagaagaatttgaaaaaatgattgcgaaagaagagctgatagagtatgctagatatgtggaaaattattatgggacaccacgtgcttatgttgaacagcagctggcagcaggaaaagatgtgattcttgagattgagatccagggtgctctgaaagtgaaagaacgctttccggacacattgcttttatttgtgacaccgccgtccgcagaagagctgcgcagacgtctgattgggcggggaacagagacgatggacgtgatcgagtcaagacttgcaagggctgtggaagaatcggagtacatggaccagtatgattatctggtggtgaatgatgatttggatgtctgtgtatcggaaatgcatgcaatcatccagagtgaacacagaagaagctcccgtaatagtgaatttattcagaaaatgaaacaggatttgaaagagaatgtgaaaggagacagatagaatatgttacatccatcgtatacagatttgatgaaagttgtaaatcaggacgttgaggagggcgaatccaaagttgtaaacagccgttactccattgtgatggcaacttcaaaaagagcaagacagctgattgacggagatcttccaatggtacatgcaaaggcaggggaaaagccgctgtcagttgcgattgaagagctcaatgccggtgaactcaagattcttgcagagaatgcagaagaggaataggtttagaaagaaaaaatgggggcagatgccgtagggtatctgcctttctgactgttgaaaaaggagagaaacaaaattatgaatatactttttatttccctcgggtgtgataaaaatctagtagatacagaagtgatgctggggatgctggcatccaggggttatcagatggtggatgatgagacgcaggcggatgtgatcgtgatcaatacctgctgctttatccatgatgccaaagaggaaagtatccagaacatcctggacatggcagaatataaaaaagaaggcagattaaaagcactgattgtaaccgggtgcctggcgcagcgttatcgtcaggaaatcttagatgagattccagaagtggatgcagtgcttggaacaacggcatatgacaagattttagatgcaattgacgaggcgctcaaaggtcatcataccttaacactggcagatacggatcttcttccgaaagtggatgcaaaacgtctggtaacgacaggcgggcattttgcgtatttaaaaattgcagagggttgcgataaacactgcacatattgcatcattccaaagatccgcgggaatttcaggagtgtacctatggaacagcttgtcgatgaggctcggtatctggcagaacaaggcgtaaaagagctgattctggttgctcaggagaccactttgtatggaaaggatctttatggtaaaaaatcgctgcataaattgctgcgggagctttgtaaaatttcaggaatccgatggattcggattttgtattgctatcctgaagaaatttatgatgagctgatccagacgatcaaggaagagccgaagatctgtcattatctggatctgccaatccagcatgcgaatgatgagattctcaaacgtatgggaagaagaacaacaaagcaggaattgatcgatatcattggaaaactccggacggaaatccccgatattgcacttcgtacgacattgatcaccggattcccgggtgagacaaaagagcagcatgaggaactgatggaatttgtagacgagatggaatttgaccgcctgggcgtatttacctattctccggaagaagatacggctgctgccagaatggatggtcagatcgaagaagaaatcaaagaagaacgtcaggctgaactgatggagctgcagcaggaaattgcatttgatacggcagaagatatgatcggaagagaagtgcttgtgatgatcgagggaaaagttgcagacgaaaatgcgtatgtgggaaggacataccgcgatgcgccgaatgtagacgggttgatttttgtcaacacagaggaagagctgatgtccggtgattttgcaaaagtaaaagtctcaggagcagtggattatgatttgataggagggcttatttcatgaatttaccaaataaacttacagttctgcgtgtgcttatggtaccgttttttgtattatttatgctgacagatcttggtggagcagcaaacaaatggattgcgttggcaatttttgtagtggccagtctgacagatctgctggatggaaaaattgccagaaaatataatctggttacgaatttcggaaaatttatggatcctcttgcagataaattgttggtatgttctgcgatgatctgtctgattgaaaaaggaagtctggcagcatggatcgtgatcgtgatcattgcaagagagtttatcatcagcggattccgtctggtagcttcggataacggaattgtaattgcagcaagctattggggaaagtttaaaaccgtatttcagatggcaatggtgatcgttctgatcatggatctgggaggcatttttgatatgatcggacagctcctgatttggatcgcactggcattgacgattatttcactggttgattatgtggcgaaaaatattcaggtgctgacgaacgggggcatgtagaatgtatacggactggattttaaaaaataaagaaagtaaagtggggaaaacaccggaagaacgggcagtagaactgctcacagaacagaatctgacagttactacagcagaatcctgtacaggcggtctgatcgcagcagcgctgatcaatgttccgggggcttcagaggtgctcaatgaaggatatattacatactccaatgaggcgaagatccgtcttgttggtgtttcctcggagacattggaacgatatggcgcagtcagttctcagacagcaaaagaaatggcagagggtgctgcaaaaacaggaaaagcagatgtggcattaagtgccaccggaatcgcaggaccagacggtggaacagaagaaaagccggtaggtcttgtatatatcgggtgttttgcgaacgggcagacaacggtaaaaaaatgtatattcaacggaaatcgaatggaaaacagacttcatacagtagaaacagcattgaacatgttggtggaagcactggaaaatcccgaaaaatagaaagtgcggattgacgaatgtcggaatttgtgagagaatgtaaacgaatacggcgttaagaatttatcaagccgcagggggaaacctcaaataatacacaattacatatgttgaaaggagttttaacatgatttattcacacgaagtagaaatgatgtgtccggtagctcagggagcaaatcacggaccagctccaatcccagaagaagcaaaatgggtgaaggcgaaagaagttaaagatatttcaggactgacacatggtgtaggctggtgtgctccacagcagggaacatgtaagctgacactgaacgtaaaagatggtatcattcaggaagcactggttgagacaatcggatgttcaggaatgactcactctgcagctatggcatctgaaatccttccgggaaaaacaattctcgaagctttaaatacagaccttgtctgtgatgcaatcaatacagcaatgagagaattattcctgcagatcgtatacggacgtacacagagtgcattctctgaggatggacttccaatcggtgcaggactggaggatcttggaaaaggacttcgttctcaggttggtacaatgtacggaactcttgcaaaaggacctcgttacctggaaatggctgaaggttatgtaacaggtatcgctctggatgagaataatgaaattatcggatacaaattcgtaagccttggtaaattcacagacttcattaaaaaaggtgatacaccaaacgaagcatgggaaaaagcacagggacagtatggacgcgtggatgatgcagttaagatcatcgacccaagacaggaataggcgataggaggacttaaaatggctttatttgaatcatatgaaagacgaattgataaaatcaatgctgtattaaacagctatggaattgcttctatcgaagaagctgaaaaaatcacaaaagacgctggactggatgtttacaatcaggtaaaaggaattcagccgatctgttttgaaaatgcatgctgggcttacattgtaggtgctgcaatcgcaatcaaaaaagactgcagaagagctgctgacgctgctgctgcaatcggagaaggtcttcaggcattctgtattcctggatctgttgcagatcagagaaaagtaggtcttggacatggtaacttaggaaaaatgcttctggaagaagaaacagactgtttcgcattcctggcaggacatgagtctttcgcagcagcagaaggtgccatcggtatcgcggaaaaggcaaacaaagttcgtaaaaaacctcttcgtgttatcttaaatggtcttggaaaagatgcggcaaagattatttctagaattaatggatttacatatgttcagacagattatgactactatacaggagagttaaaagaagtttcccgtacagcatattctgatggacttcgttccaaagtaaactgctatggagcaaacgatgttcgtgaaggtgttgcaatcatgtggaaagagggagtagacgtatctattacaggtaactctacaaacccgacacgtttccagcatccggttgcaggaacatataagaaagaatgtatcgaagcaggaaagaaatatttctcagttgcttcaggtggtggtacaggacgtacacttcacccagataacatggcagcaggaccggcttcttacggtatgacagatacattaggacgtatgcattctgacgctcagtttgcaggttcttcttctgtaccagctcacgtagagatgatgggactgattggcgctggtaacaacccgatggttggtatgactgttgcagttgcagttgcgatcgaagaagcagcgaaagaaggaaaattctaagaaacagcggaaaatcgcaggttttgaagagtataaggacgtgtaagggtgtatagataagtggtacattagtacattattagtacactattagtacaagtcgattagtacaagtaaaataataaaaagggcgtgtgaaaaacataagtttttcgctcgtcctttttattgtgccgaatttcggtacaacttattggaggtaagagagtctgcaggaaattttgatgggatccgggaaagatacactgataagagaatcagttcagaagcgttgtctctgattggtcagatggcaggttccacagaactgattgagatgagaaaatcgatggaggtgacgaatataaaaaaagaaatcattgcttttgcaaactgtgagggaggaaaactgtacatcggcgtttaggatgacggaacagagagaccatattatatagcaaaaaaaggattgcgtcctgaaggtgtttatgtccgtcagggttattcttctgtttcggctacaaatacggcaatccgtcgcatgatcaaagaaacagacgaagatcattttgaagaaatgcggtctttggaacagaatttaacctttgaaagtgtatgcaattaaagctgctgtttttcaaggtgcaatgcagagtgaatttaaggagcggaaagagttttccggctctctgtttcagcagatgtatagcgtattgacagacgggattatctggaaaccgcagtcagagaggttcgtttgaatcttctggtacaccgtgaatattcattccgtgtcagctccttcatcagcttttatgcagacagacttgaagttacccctatcggcggtctggtaagcggcgtgtccttaaaagatgtaaccatgggaatttccgtctgtcgaaacaccaaactggcaaatgtattttaccgtttagagttgatagaagcctatgatggaaccggaatgacaccgcagatggaaaccgctgataatgtatttaagattattcttcctaacctgaatacaatgcctgaatccgcaagacaaaaacagataaatccagagaaaggcacatcggaagaaaaggtgattgctctgacaaaacaacggggttttgttacaagaaaagaaatagaaatactgcttggtatgggtcagtcatcatgcggacgtctgttaaagaaaatagttgattatatgccttataaggcgtatgataagaatgcagaatgaaatactaaagaaggtgacgaaattgaaagataatctaagtagtgtgaagaggctaagaaaagctcttggaattacgcagagagagcttgcggagaagacgggaatcaatcttcggcaaatccaaaaatatgagtcgggagaatatgataccggaaacatgactttgaaaaatgcgatagcttttgcagaagcattgggatgtaatgtaaaggatttgttataaaatgtaaaatagattcagctcctatcgataaaacgcctaataaggcgtaaaattaaactatggaagaaatctaaaaaagggaatgtatgatatgacaaataatgtttttgaagtaatgcataaagatagaagagttgcaagaattgattcatcttctggtagatgtaaaatatattataaaagttttatgccgtataacctatatcttgaagaagaggaaaatattgattctcttgtaaacaatattacgaattttaactattggtgcgctacaagagtactcacattggatagaaaatatgcaaaagaaatattgaatagtattgggatgagccaagctgtaacagataaggatcgtgcaaaagtagcattatcatacaggtgtacatctttgacagatgttttctgggtaagaaataaaggtgaaaagataacattttccgaagtcaatttgtatgataatcatcttgaaaatatttttatagacattgctctgcgaggaaaacaatatacagtcaataatgaagatctggcaaaagatttgtctacaaatggtgttttcccgaaagcctggcaacgaacagaaaagggattttgcttgttaaaagatggcggagtagaagtcgttgagaaagaattgttatcaagtaaaatttgccagtgttttgatgtaaaacaagttatatacaaaagaggtacatttgacgaagaaccagtgacaatgagtgataatattacatcaaaagatttttctattgtgtcaatggaggcatttgaaatttattcacagaaccatgatcggaatattcgtaaatatattttgtcactagataaacatgattattatatgatgaatattattgactatcttgttgggaatactgatcgtcattgggggaactggggtgttctggtaaataatgcgaataataaaccagtgtctcttcacccattgatggatttcaataagacatttaactcgtatgacacagtagatggatcgaattgccaaacttgttttgggaaaagagttagtcagaaggatgctgcattagaagctgttgggaaaattggattgaatcaaataaaagaagtaaatcgtgactggtttcagtattttccggaatatatcgatatgttttatgagagattggaaattttaaaaagagtgaattgaagtagaaataatttgtttatagtttgctgattgtactattgcaaatacttttacagtatgctaaaaattaaatatagttggcatatgtcagatggaggctgataaaatggagacaaagccagaagtgaagtataaaaaaggagatgctgtattgtttcaatgttttggagaaataaaaagtggaacgattgttatcgtggatgcgcaaggaacgttcttccaacaggaagagccgtcttacgatattgaggtgacagaggatcctcatggtcggaacggattgtataaacatattcagcaatcttggattattaaaattaaatgaaagtttaacaggatagtaaagcaatctaaaagaacctgttttttaaaagtgatatatgttattttaaaataaagagcaaggatagaacaagtgaatgaatccttgttcttttactttataggaaagttcgactcttatcgaattctcgaatgaaaatagcctgcataaaagcgggcatgggaacaagatgacactcgttagaagatataaaaaccttctgcatacagttcttcctttaggagaattataacacagattatagatagttttcatcctatagctcaatgaatagagtatggggttgcggattgtagaattacagttcgaatctgtatagaataaatggtgattgtattgagcttgcaaagaaaagagcagttgtaatataattaaaagacatcagaaggaaattcttatgttattataaatcaaaaaagtgaagggaaaacgaaatgggaaaattatattttcgctatggtgccatgggcagcagcaaaacagcaaatttgttgatggtccattacaattttctggaaagaggaagacggccggttattttaaaaccgaaactggatacaagagatggcgcatatattgtaaaatccaggattggtttgcaggcacaatgtgaattgattgaagagttcatcatgaagccggatacttatgatgcaattctggtagatgaggctaattttttgacatctgtacaggtagagtggcttgcaaagatttgcgaccaatacgatatccctgttttatgctatgggttgaaaacagatttcagaggtatcttgtttgagggatcaaagcgcctgatagaacttgcagatgtgatagaagaacttccaattatttgctggtgtggaaaaaaggcacattttaacgccagagtcattgacggaaaaatcgtaagagatggagaacagattgccctgggggcaaatgatctgtatgtgccgctttgtcgaaaacattatatgagtgggaaaatcaagccttatcaaagcgttgatttttcagaaatatcatctgaatgaacggagcggatttttagacaaactctttggaaaagattgtttctggagaaaagacaaggtataatgagaagagaaaagatcgaaagataaggaggcagtaacgtgtcagaagaaacgaaagagatagaagaagcaaaggaaaataagatagaagcggaacagccggcacattctcagtctgcagaaaaatctgttgcagagacagtgacggagatttcccaagcagcagaagtgcagacgcagaaagaaaggagtgaaccagctccggaacagaaaaaaagttttatccgatcaaagaaaaaagtggcggcatccagagaggaacagattctctcccggattaaagatgaagatttgatgaaatatctggagatggaacatgaaaggctggagatgctgcagagcatcaaggagtcgagagagaagaggatctttacgatgcttcagctgttgatttccctggcagcaattgtgatcgttgtatttttgttgaaggataatccaacagtccttgtgaatattttgtatattgtgggaatcatcattgtactctggatcttgaggggatcccatgagaaaaatccatttaaaaaagagaaataaaatattctgtacgaaaaagaaaagataggatataatacaaaggagatgcggtgtatgctgcatctctttttaacggaacaccataatttgacagaggaagagaaagatgagtacagaactggaaaaatattataataaattttgtgaagaaaagagactgaccagaagacatgggtatgtagaatatgtgacatctatgaagtacattcatgaatatctgcccaaaggagaaaaagaagaaattaaaattctggatgtaggagctggaacgggacgatattcggtacagcttgcggaggaaggatatgacgtgacagctgtagaacttgtaaagtataatctggggattttaaaatcgaaaaaaagcagtgtgaaagcatatcaggggaacgctttgaatttgtccaggtttgcagaggatcagtttgatctggtacttgtatttggtccgatgtatcatttgtatacaatggaggataaagtacaggcattaaaagaggcaaagcgtgtagtaaagccggaaggtgtgattttagtggcgtattgcatgaacgagtacagtattttgacatacggattcaaggaaggccatatgaaagaaagtatccgtgatcagaaagtagatggcagctttcatgtgagagcaaaagcagaagatctgtatgattatgtccggattgaagatattgacgcaattgatcatgcagcgggtgtaaagagggtgaaactgattgcagcagatggacctgcgaattatatgcggactgttttgaatgcaatggatgaggaaacatatcaattattcttacagtatcatttgtctacgtgtgaaagacaagatctattgggagcaagcgcacatacactggatatcgtgagaaaataataatatcaggagaaagtatgaatcagacagaagagatgagcagaaaagaagagcagtttttagaaaacgtattggaaaatttgagaagaagaatcgggcagatttcacaggaattagaagaaggccaaaaagatattgagagtatgcatgaatattactgggagaattatacggaaatggaccagtacggctatgaagactatgataatcagcaggcactgctgcatcggatcaatgccaatcaggaaaagctggatttaaagcaccgattccagaagatgctggattccccgtttttcggaaaagtggattttatctatgagggagaggatgaggcagaatccttttatataggaatcggaaattttgcacagagaacaggagcaaccccgttgatctatgactggagagcgcctgtaagcagtttgttttatgattatgacagtggtccggcatcttatgatgcaccggcagggattatgacgggagagattgcctctaaatggcagtacaagatttcacatggaaaaatgatctatgcgtttgaaagtgatacaaaaatagacgatgagattctgaagcaagaattaggaagcagtggggatgtccagctgaaaaatattgtgcgtaccatccaaaaggaacaaaatgagattatccgcaataccaaagataaaattctggtcattcagggagctgcgggcagtgggaaaacttctgttgcactgcatcggattgcttatctgctgtatcatgacagagaacatttgaaatcttccaatattttgattctgtcaccaaatagtgtgttttcagattatatttcccacattcttccagaacttggagaagaaaatatccgggagatgagttttgacctgtttgcatacaaagaattaaaagaggttgtttcggattgcgaagatcgataccaccatatggaacgacagatgaaatttccggagcaggaaaggcagaagagataccatgaaaagcagtcttttgcaatgacagggcagatcgaaagttttttggcggttttggaagatcagttattagatcttacacctgtggaatttaaaggaatgcagcttacggaagaggagatgatcgaactgtgttattttaaatttcaggagataccgcttttgtccaggatggatgcaatcaaagattattttcaggatcaatatgaaacacttcataacaggaatctttcggaggaagaggaggagattttacaaagaaaatttgatcgcatgtatgtaacaaaggatctctatcagatttataactggctcatggaggagtgtggatatgagaagctgccagaagttccttatgaaagacggattctggagtatgaagacgtatttccaatgttgtatttaaaatatcgtttgaaagggaaaaatgaacaccgtaacatcaagcatttggtgattgatgagatgcaggattattcttatcttcagtatgtgattctgcagaccttgttttcctgcagaatgacaattctgggagataaagcgcagacactggatgaaaaaatgcaggatgtgctgttgtttcttcccaaaattttcgggaaaaagattcgaacgatcgtgttaaataaaagttatcgaaatacagtggagattgcaacgtatgcaggagcaatcaaccatacgacagatcttgagcttttagatcgccacggaaaagcagtagaggaaagagcgttttgggaagaagaaaagatgctgagagccattgtagagaatctgaatgtaggagaaggtggctacgagacagcagcggtgatcgcaatgacagaagaaaaagcaaaggaactctatgaacttttgaaacgaagggggatccggacatcgtatattgatcgggatacatcggtatttgagcgcggattgactgtgacaacattctatctggcgaaaggacttgaatttgatcaggtgtttggagtgtttggagataaggaaaatcctttgatgacacaggcaaaatacatctgtgcgacaagagcgcttcatgagctgtatatgtacgttccaaagtggacttattgaatttataaaaatttaagaaaatgcacgtaattgacaagaaccaaagcggatgatataatgcctccccgatgactttacaaaaagggaggcttaaaatatgactctatatcaggagctgcagttaaatcaggtcggatcaaaacaattgatccgaaatacgaaaggcaaaaaagagaaagtacggcatattgcgatttattttttgaaaattttaatcacattggcattttgcgttgcgtttgttacagtctacacaaaaatatttggagatgagaacagcattgtaggtgttgttgtgctgttgagtgtgatgacgtttcgttttgctgattttggaattcatgcaccacatgccttgagttcgttgatggtaatctggggaatcatgacttttggtccgcgtcttgcaaatgcgggaaatctgatgacagaattgatcgtcaatatcgtatgtatttttgtgctgatgcttcttggatgtcacaatgtggtgatgttcaatcagtctacattgttgttgggatatcttcttttatatgggtatgatgtttccggaattttatatgtgcagcggattgcaggaatggcagttggcgggattcttacggggattgtattttatagaaatcacaaaaataatcagtacaagcggacattgcgtcacatttttgaggagtttgatgtgttctcatccagaacaagatggcagctctgtgtgacacttggggtctccagtgtaatctttttcgcaggagtgtttggtctgcccagagcaatgtgggcgggaattgcggcaatgtcagtgttggttccgtttcaggcagatatgaaggggcggattaaaggaagaattcccggaaatattctgggtggtctgacatttattgttctgtatctgatcctgccggaatcgatgtattctctgattggtattcttgggggaatcggagttggtctctctgcaacatatggctggcaggcggtatttaattcctggggagcaatgtctattgcaatgacgtttttaggagtaggtggtgcaattttttatcgtatttttaataatgcgtttggtgcattgtatgcgcttgttttctatcagctgttttccgtttgtatggatcggattgcacagacaaagaaaaaggggctgtcgcactaaataattagtgcgcagcctcttttctatgcaaaaaattacagccaggcttcgaaaagcctggctgttggtgtaaaatataagtatgcaaacccctatattattacacaagaattatactttgaatgaggaaggatatcaactaaaacttcctttaaacttagaaacaattattccagtagatgattctgtgcggttgctgagtcagtttgtggaggctatggatttaacggacttatattctacttatgaaagaataaatacagtatcgccaagaacactcttgaagattgttttatattcctatatgaatggtgattattcctctcgctctatggaattgaactgtaagcgagatattaatttcatgtatcttttagagggaaaaccagttcctgaccatgccacttttgcccgtttccgaagtattcattttgctccgtgtgcgaaacgaattctcgctgaaatgtctaatctcctttacggacttggagaaatttcgggagaaacgatttttatagacggtacaaaaatcgaagcctgcgccaataaatatacatttgtatggaaaaagacggtaaccaaaaatcaggcgaagttgctgattaaaatcgccgatctcattgcagaatgtgagcaactttatggtattcggattgttcacggtgatactgttaaaatgaaacacgtaaaacggttacgcaaaaagctgtacgcattaaaacaagaagaaaacattgtatttgtacatggtattgggaaacgaaaaactcagctgcaaaagagtatcgaaacattagaagactatctggaccgtttaaaaggatatacaaaaaaactgcatatttgtggaaaaaggaacagttattctaaaaccgatccggatgccacctttatgcggatgaaagaagatgcaatgggaaatgggcagttaaagccagcatttaatttacagcatggagttgattctgaatacattgtatggctgacaatcggaccacagcccacagatactaccaccttaattcccttcttaaaggaaacagaagaatatctgacatttaagtatcaaaaaatcattgcagatgctggatatgaaagtgaagagaattatgtatttctagatcaaaatcagcagttggcatttatcaaaccatcgaattatgaaatatcaaaaaagagaaaatataaaaacgacatcggccgtatagaaaatatgaagtatgatgaaaaaagtgactcttatatttgtaaaaatgggaaacagctgccctttacacatctccgtcgctctaaatctaaaactggatatatcagtgaaaaaaacatttatcaatgtaaagaatgtaaagattgtccttacaagaaagagtgcatcaaggggaataactgtaaaacaccaatagaagagcgaaacaaagtgctttccgtagcaaaaacatttttgaaatatcgggaggaagatttggagcggattctttctgacgaaggaattcttcttagaataaatagaagcatccaagcagaaggatcttttggtgaactgaaacaggatatgcagtttcgcagatatttgagtcgtggcacagcgaatgttcttgctgaaagtgttttgctggcaatggcaaaaaatgtaaataaacttcataacaaaatccaaaaagggaaaactggaaggcatttatttcctttgaagagtgcataaatttagagaatccgaaatttttttcaaatccagttttggattgtattaaagtacggcttttttacgaaaaagctatcgtttcaatagaaacagagcaactatatagcgaaaatcagaaaaaaggaagctgccgcttcacgatttactaatcgttaaagcgacagcccctttttcttttttgatcataaatccggatgtctttgcgataaaacaagatccctataagcatggtcagaaattctgcgcaagggaaggccagccagatgccggtactgccgaaaaacagaggaaggatataaacaaatgcaacaaccagtatacatcctcttaaaaggcagaggaagagagattgtacggattttgccacggactgaaaataacagataaagaccatgttgatgcccaaaaacaaaaatccagtaaaataaatacgaatggcaggagcagacagagtcaggatttctctggttggctccagaaaaatgtatgtaaataaatttggaacaaatattccaagaagaaccggtaaagtacagatgatcacggatgtttttaaagagagcgactgtatctttaaaatccggctgggaagtcctgctccgtggttaatggaaagaattggctgtgctgcctgttcaattcccttacagagacagatgacgaccagtgcagtattacagatgatgccatatacgctgacgcctgtattccccagatagcgaatcaactgcagattaaaaataaaaatcgtaaatccggaagcggcttcaatgacaaagctggtaaatccatttgcaatgattttctgcagaaaagaaagccgaaatccttttaatgtaaacttcaactgatttttctttgagaaaaaatgtgtgcataaaataactacagttaggctggagccaaggactgtggcaagtgcagcacctttcattcccagatccataggatatacgaacagataatccagaagaatgttcgtaatccctcctgcgatcacaccattcatggcaagctttggagcaccgtcattgcggatgaatgtctgaaggaaagaagaaaagaaatatgtccacattccccagatgatatatggaagatagtccataatataaggcatggtttcttcggtaccgccaagcagccatgcaatgtcttccataaatacaacacacactgtcatagaaagaaacagcagcacaaaatttaacagcagagctgttgtaaagtaggtatttccttcctcttttcttgactttccacggcagatggacatcagtacagatccgccaacaccggataaaagaccaagtccaaaaaagatattgtagataggcagggagatattcagtgctgcaagagcggtggcccccagtctttttccgataatgatcgtatctgcaagtacatagatggatgtgaccatagttccacagattgccggtatcagatagtgaaaaaataattgccgaaccggtttttgaataaattcattggtattcataatataactccatttctgaaaaattctctgcatgatagtgtatcatagaatgactttttagaaaagctgtttcaaaagaaaacaatatcgtgtataataaaaaaggttattgtttatgaaaatggaagaagatcggagggaaaattgtgaggttgaatgcattttgtatggcatgtatgatttccagtcaggaggccaagatacgcagatttgcggatgaagacaaaaaagcacagtatatgcgggaagtaatgaagctgatggcagaaagtgacacatccatatcatcgccggctcttttggtgccgatttcagaaatatacgagaggtattgggggaaaacagacggaatggaggaagcaaaaaagcagtataacgatttgcttcttggcatggaggatacactggaatcacatattcgtgcacagacggatccgttagaggcagcactttgctatgcaagaattggaaactatattgattttagtgcgctaaaagaaatttcggaagagaccctgttatccatgtttgaagagcaggatcggatttctctggatcctgctgagtatggatgtatgaaacgggacctggaaacagccgatactttggtgtatcttacagacaattgtggcgaagtagtgctggataagattgtgatccggcttttgaaagaacagtatccagatctgaagatcacagcagttgtacgtggctgtgcagtgaccaatgatgtggatatggaggcagcagaatatgtagggcttacagaattggtagaagttctgggcaatggcagcaaaatagcaggaacagagcttgcttttgtcagtgaatctgtgagagaacggattgaacaggcggatctgatcatttcaaaagggcagggaaattttgagacgatccacgggtgtggattcaatatttattatttgtttttatgcaagtgtgaatggtttatgcaaagattcgatgccgggagactggaagggatgttcgtaaacgaaaaaagaatacagaaaaattgtgagaaagaaggagagataagatgattggaattattggagcaatggaagaagaggtacaggcgctgcgacatgccatgaaaattcaggaggaaaaagaaattgcctctatggtatttcacaaaggaattttatatggaaaagaagcagtggtagttcgaagcggaattggaaaagtcaatgcggcgatctgtacgcagattttagcagatcactttcatgcagactgcgtgatcaatacgggaattgccggttcattggatgcggcgatcgacatcggagatatggtgatttctacggatgctgtacagcatgatatggataccagtatttttggcgatccgattggacaggttccccgcatggacacatttgcatttccggcagacccacagctggcagaaaaagcagtccgtgcgaaccaggaagcgaatccggatattcatacctttaccggacgaatcgccagcggggatcagtttatttcttcacaggaagtcaaagaacggattgtggaattgtttggagcaaaatgtgcagagatggaaggggcagctatcgcgcatggtgcgtatctgaaccgcattccttgtgtgatcatccgggcaatttcagacaaagcggatcacagtgcgtctgtggactatccgacctttgaaaagaaagcgattgaacattctgttcgtctgttggaaaaactgctgcctgaattgtaaaagtgggagaacaaaaatgaaaaagaatatgaaaaaattggtgattggagtgagcattctggcaatgacgcttggaagtctgatggggtgcggcatttcagaaagcaaaaacgcagaggaagaaggacttatgaaggagctcccggagggatttgatgaaaagactgtaaaagagcaggcaatggaagacattgagactgcacatgcaaaagactatgagagctggaaaaaccggtttgcaaaagatcttcagagcagtctgacagaagaaacatatcagtcttatctggaaatcctggagcagcagggagacttcaaaggatttggaaaatgtacttatttgggacagataaaagataacaaaaagtacggcggtgttattcttgtggtaaaatatgacgaaggcaatgtcaaatatagtctggcgtacgatgaagatatgaatctggtcagctttacgttgtaagaaaatgatgaaaaagaaggagaaaaagatatggtacatcatattgtaatgtggaaatggaaaccggagatggaagaggagagaaagaaaatcctgaaaaaagaaatggaagttcatctttgcagtttggtgggaaaggttccaggacttttaagtgcagcatttgtgacggaaccatttacatcaagtacacatgatatggctttggtgacaacatttgaaaaaccggaagacattcaagggtattccgtacatccggagcatgtgaaagtggcagacacatatgtacgtccttttgtgacagagcgtgcatgtttggattatgaggattgaggattaaaaaggtatcggagcgtgtaaaaaagctccgataccttttttaaaatgagtagtccagcaattctgaaaaacgcagaatcttatgatcgtaatgatccggagatccaaacccgtatccggcaaagataaaggggatttttgcaaatgcgcaggcgtcggcatcgccctgagtatcacctacataaacagcatctttgatctgacatcgatgcatcagaagacggatgttctctcctttagagagtcctgtatttccaaaacattcaaaatccgttacaacatcttttaatcctgttttcttcaagaaaagctcaatgtaacctttctgacaatttgaaacaatgcagatggggtggctttgaaacagagtacggatggtttctgccacaccatcgaacaaaagctgttctttggcgttttccagataatattcttcatattcgcagcaggattccatgacaagcatcctctgcgatgcagaaagagacgggaaaagatttgctgcgatctcatccattggttttccaaattcttgcttcagacggtctgctgtaattggggtatccagtggaatcatcagttcgctggcggcctgcatccaggcttctgccacaactcctgttgtgtcccagagtgttccgtctacatcaagtaagattgcttttttcatatcttaaaatcctcctgaatttttctttgagctggcataatatccagctgccagttctccggcaccatcgatcaccagacaaatgccaaaaaacatgatcacaaattttgttacatcaaacgggttcattatcagaatcagtccaagcagcagtggaatcaccgcagagattgcgagcgggagaaatgctgttgggagaagctttctggcttccaatgcagcaggaagctttccgattccgtcaatcaggagcaggacccccagtgtcagaggcagaaaggaaaggacaaattctggaaatgccacacaaagaattccaaatgcaagaaacaggattccagaaataaaatgccggatataaggatactcctgagctttgcttcgtctgtatttccagaaacgagttacggaatagagaatactgcctccggccagaaaccataaaaacagttttgcagtgataccgggaaataaaaccaggagcagtccggcagcaatatacaagatagaagtccagatagaaattttacgattccagaaaaaatcaatcataagggttcctccttttttatttgaattcttcagaacagtataagagttcaaatatagtatagcacaaagttctgtggaaaagaaagcaaaagagtcgttggaaaccggttgatatctatgctataatgaacagagtttttgacagtttgaaacaggagaacagagaaagaaggtacatgacacatgatccgttttgtgacagaagaagatgcacaggcattgcttgcgatatacgcacactacattgatacagagattacatttgaatatgagctgccaacagaagaagaatttcgagaaaggattcgaactgtttcggaagaatacccgtatctgatctacgaagaagaaggaacaatttgtggatatgcgtatgcacatcgtcagttggagcgagctgcatatcagtggaatgtggaactgacagtatatctgcatccagctgtagtttccaagggaatcgggcggaaactgtatgaaagattgctgcagcttcttacagagcaggggatttgtaatgcgtatagcctgattacacgaccaaatgaaaaaagcgaaaaattgcatgaggcaatgggttttaccctgatgggagttttgaaaaaaacaggatacaaaaatgggaaatggagagatgtgagctggtatgaaaaacagttaaatccgtatccggaaaatccgattccattccgaaagattaccgaattgttgacggatagatgaaaaatgattgtaaggtattcatgtaataacatagggaaggatgaggaaaatgaaagaagatcttgtgcttacaattacgatgttgatttttttaattatcgtaatgtttggtattcagatttcaaaaagaattaagatcaggcggtttcaaaaagaaaaaatttgcagacagtttgggaaaataccggatatggatagcacgttgccaatggatcgaatcaaagtctactatgaacaaatggaagagggagatgtagatcaggtgacctggtcggatctttctatggatcgcatttttcagaggattgatcagtgtcacagtgcggcaggagaagcggtactttatgatatgctacatcggacagaaggaaaaagtcaagagcagttaaatgcgctgcttcattattatggcggagaaaaagaaaagcgtgagaaggcggagaaaatcctgatttctttaggaaaacgtgaaggattgtattatcttccagaatatgtgaatacactgcaggtaagtcatgttggctcactatccttttatcgattgctccagatcctgcttttaggaagtattgcaggaggagtgtggaaggttcagattttgcctctggccgggatacttgcaattgtaaatattgcagtttacattttgttcagaatgaagtatgagcaacagatgagtatgatggaattgatgatacttgtgatagataccggaaaacagcttgtcaaagaagggtgtgcaggtccattacaaaatgagttggaagagagattacaggagtttgataaactggataaaatgattgggaaaatgtcttctatgagacgaaacagttattccggtgatcagggagtatttttagactatttgtttggcattactctttggcagctcgtatcttatgaaaagagtgtaaaatggctggaagataagcaagaaaattataaagaattgtttgaaaccgttgggcgtttggacgcatccatcagtattgtgtcatttcggaagagtcttccgttttatacagaaccagaatttcataaggaaaagagaatttatatggaggagatgtatcatccccttctgaaagatccagtgagtaattccatggactggaggagaaactgcataattacaggtagcaatgcatctggaaaatcgacctggatcaaagcagtggggctgaatctgattcttgcgcaggcaatttgcacttgtactgccagacggttccagatgcatccgggacagattctgacttccatggcagtcagagatgacatcatgaaaggagaaagctatttcctgaaagaaatgaaatatttaagaaggatgctacagcatttttcagatgaaaatttggtcatttgtattatagatgaaattttaagagggaccaatacaaaagagcggattgcagcatctcgggcaatcctggactatatgcaggggcagaacgctctggttatggtcgcatctcatgattacgagttgacagtattattagaagaaagctatgaaaattatcattttacagaacgtatagggacggatgacatttattttgactatacgttgtatccgggtgcagtggcctcgggaaatgcaatacgattgttaaagtttatggagtttccggaagaaattgtaaaagaggcagaaaaacaggtgaacataaatttggggaaaatgcatgaaaaagaaagaaaatcaacgaaaaaagcaatggaattgaataataatagtaaataaaatattaaatttttataaaaaataaattgacataatgtgtagcatgccgtatagttaacatgtatacatagtgtgtgtcaaaaagtaaaaaggagggaaaattatgaatctagacaaaatttttcgcttgaaagagaacaacacaaatgtcaaaacagaaatccttgccggtgttacaacgtttatgactatggcctacattctggcagtcaacccgaatattctggcagaagcgggaatggatcatggagctgtctttacagcaacagcactggcagcgttcatcggtacattatgtatggcaatctttgcaaactatccgtttgcgctggcaccaggaatgggattgaatgcatatttcgcatatactgttgtactgcagatgggatattcctggaaagtcgcactggcagcagtattggtagaaggtatcatttttatcctgttatcactgctgaatgtacgtgaagcaatttttaatgcaattccgtacaatctaaagaaggcggtttctgttggtatcggtctttttatcgcattcatcggacttcagaatgcaaagatcgtgatcggtggatccacacttctgagtttgtttagtctggacggatataatcaaaatctggcagccgccgcaggtggaaaagattttgtggaagcaagcatgaacgatgtggggatcacagtgcttcttgcaatcgttggaattattattactggaattatggtgatcaagaatgtaaaaggaaatattttatggggaattttggtcacatggcttcttggaattatctgccagtttgcaggactttatgttccgaatccggagcttggcttctattcgcttcttccggatttcagtgcaggaatcagtatcccaagtctttctccgatttttgcaaaattcagtcttgagggagtaccgattctggaattcatagtgattgtatttgcattcttgtttgtagacttgttcgatacacttggaacactgattggagtttcttccaaggcagatatgttggataaagacggaaagcttcctagaattaaaggtgcgcttcttgcagatgcagttggaacaacagcaggcgcagtactgggaacatctacaacgactacgtttgtagagagttctgcaggtgttgcagaaggtggacgcacagggctgacagcagtaacaactgcaattttgtttgcattgtccctgctcttatcaccaatctttttggcaattccatcctttgcaacagcaccagcgctggtagtagtaggattttatatgctgagtgctgttacagatattgattttgcagatgcatccgaaggaatccctgcatttatctgtatcgcagcaatgccgtttttctacagtatttccgaaggaatctccatgggagttctctcttatgtattcttgaatctgctgacaggaaaagcaaagaagatcagtccggttatgtatgtgctggcagtgttgttcatattgaaatatatattgatttagcggtacatcagaaagagacgatctggtgaaaaaaggtccgaataaccttgtatgaaggttgttcggactttttattttcgaatgacataatatgttttatggtcttgttggattttagaaatcagatgttgacggagcatgtaggggagcagagaatctaaaaattgctttggatctgtcacctggatctgttcactggaaaatggttgttttgcatgcagatccttgacaatttcttccagctcctggtgagacagctgtttttgttttttcagagctttctgaattttggaaacaccttttgaaaaaagcagattggataaatcctgctgctgcttttgacttctccaaagcccccagccgtagatcagggcagtggcggctgcaaacaaaaaaacaaaggggatatattgaagcaaggacattttaataaacctcctttagttcgatcagatgatgatccttcaaaatttccagaaatttgatcaaccgggcaagtggcttttccatcttcgggaactgagactgtagatccaaagagagttgatgtaccgttttttgatcattgattgcctgccagagaaaacttccatattcatctaatttgattgcgcttactttgggacgtttgaaaaaacgctgggcaatccgatggtaaaaccctttccattcaatcatgacagtaatttgccccttgtcatttgtttcatattcgatttcgggatttcttacaacgatataatccatataattttgattggaaatcttttttttctttgacatacttcctcctttaaaataaagaataagtacagcctgtctttcgacaggccgcagcttacaatttctgctgtttcagtgaattgaataaaaattattcgtttttctttccgcctttgatacaaactcttgcgaggtataataaaagcagaataaatacaacgaaacttccgatctgtccgattgagaatttttcggagagatcgatgatcgtatctaattttgcaacggcaaagattgcgaggattacacccattaaaccttcacctgcgatcagaccagatgtaaagaggattccatgatccacacttgcttttttctctttttcagagacttttcgtttgtccatgaacagacgaaccagaccaccggccataattccggcatttaagctgaatggaaggtacatgccgactgcgaaaggcatgaccggaactctcaggatttccattacaatcgctacacagacaccaatgagaatcagtgaccatggaagttctgcgctcataattccttcgaccagcattttcatcatcgttgcctgtggagcaggaatggcttcagatccatatccccatgcgttgtcaagaagctgcagtacgaatccaattgcagcagcagaagcaacgacaccaatcatttcaccaatctgttgtttctttggagttgcaccaacaataaatccggtcttcaagtcctgtgaacaatctcctgcaatcgctgcgatcacacagatgataccaccgattgcaatggcgcctgtcataccctctactccagttgtacctgttgcttttaacagcagcgttgcaatcagaagtgttgcgattgccataccagacactggattgttagaagatccgataagaccaaccatacgggaagaaaccgttgcaaagaagaatccgaatacaatgacgatcaaagcaccgatcggatttaccgggaatgccgggacaagccagatggcaataccgattatcaggatcatgactaataagaatggcattggaagatcctgctgtgtacgcagtgtagcggaatcgccatttttctttttcatactctgcattgcctgcttaaaggtctttacaatgagtggaagactcttgattagactgatcacaccaccagttgcaaccgcaccggcaccaatatatttgatgtaagttccccacagatcaccaggtaccatctcagcaattggatcagaaccagggaaaatagactgtgcatcagcaccaaacagggcaatagccggcatcaaaacgaaccagctcaatgtactaccagccagcatatagctggaaatcttcggtccacagatataaccaacacctgcaagagccggaagcacctgcacaccgacagaagaaccggcataggatttgatatcgtatccgatttcgcttgggaagatcttcagtccatctgctatgaatttataagcagcagcaattccaagaccggagaatacagtaccggctttgcttccaccttcttctccggcaagaagaacttctgcacaggcagtaccttccgggaatggcaatacaccatgttcctctacgatcagtgcctgacgcagcggaaccatgaaagcaacaccaagaagaccacctaccagagcaacaagaaagatcgtgatcatgcttggagaatcaatggttccttcctttgcccacaagaacagcgccggaagagtaaagatcgctccggcagcgacagactcaccggcagaaccgatggtctgaacaaggttgttttccagaatggaatctctgcggagaatgacgcggatgattcccatagaaataaccgctgccggaatagaggcagaaatcgtcatacctacacgcaatccaagatatgcatttgccgcaccaaaaatgatggcaagcaaaataccaatcaggagagaggttaccgtaaactctggcacgacacggtcggccgggatatacggtttaaaatcatttttattgtttgacatgtataaattttcctttcttttctcaaaatctctttcccaatccatctgaaattacagcaaaatctatatcagagcattcctgcatttcccagaagatgcaggaatgtcataataccaaatacaatgttatgcaagttttttcaagacatctgtcaataatgcataaaagcgttcgaaagaatccagaggcagatgctcatccggagtgtgacatccgcgaattgtaggaccaactgcaattgcatccagccccggaatcgcatccgagaaaagtccacattccagaccggcatgaatggcctcaatcttcagttcatcgtgaaacagttctctgtagctttctacaaatacatcacggatcggagaaacttctgcaaaactccaccccggatactcgccgtgcatgctgactgcaaaaccaaaggtttcggcaagaagactgagtttttctttcagtgcactcatcagtgtagcaacagaggaacgaggtgcaaatacaagagaagcacttgtctcatctgttgcagcaattccaagattcagagaagttacagtaaatccatccaggttcatattgcggaactgtacgccgtttggcgccagatacatggctgtaataaaagcggttccgtcttctctggaaattacgtctgcatttcctttctctgtgtttacaagaaactggaatgccggctcatatggacagatctcggccgaaaaatcagaagccagagtaagagcaagagcttctgcattttttgcagcggcctcatctgggtagaacagcgttgcggaggtctcacgcggaatcgcattgtcctttgttcctccatgaaaatctaccagaagagcatctgtattgtggaacaggtgattgatcatacgagccatcagcaagttggcattctgatgctctttgttgatatctgttccggaatgtccgcccagaagtccggttacttccagacggagcaggattccttctttttcattgcgcttgatcggacgagtaaggttaaagcgaagtccgcctgcacagctgacggttgcaactccctcatcttctgagtccagattgatcattgtgcgggcagagagcagagtcttatccaatgcttctgctccatttaaaccaatctcttcctgtgtggtaaatacacattcaagggcagggtgtaccagtgtgtcatcatccagaatggtgagcatacatgccacggctgctccgttgtctccgccaagtgttgtaccgtttgcagaaagaactccgtcttttacgatcagatccagaggatcgacagcaaaatcgtgtgcaacacctgcaagtttttcacataccatgtctgtatgtccctgaagcataactgctggcttttcttccgagcctgcacttgcaggttttttgatgatgacattaaaaagcgcatcctggtgataccacagatcccgttccttagcaaatgctacaagatagtcgctgattgccttctcatttgcggaaccacgaggaattgcactgatttcttcaaaaaagtgaaataacttttctggtttgtatcctgtgattttataatccataaatactacctctcttctttaacattataatctgttttattctagcacttttagcatggtaaagcaagaaaattctgcgaattaaagtggctacgcaggaaattgaaatagatttccgttctggcaggagaatagagagaggtaattctgcatacatttcagataagaggggatatgtggcagtgcggatatgaaaaaagaggcagacaaattaaaggaacggattgcggcagctgcaaatatgcccagagatgttgttttgggtgactctgtcgtgacagtgatcggaaatgaggaaatttgtattgagaattaccgtggaattttagaatatacagaggaattgatccgtgtacagacgaaaaagggacagattcaggtacacggaaacagattgcagattgcgtattatctaaatgatgaaatgaaaataacagggaaaattcataccctggattatgaaatgtgagggaaagacaatgcagaaaatcctgcgtttttggaaagggtatgtaaagatcaaaataaagggatactccccggagcgttttttgaatctgtgcagtcatcatcagatggatatttggggactgacatcctgtgggaattcttatgagttgtatatgaagctgaaagactttcagaaaatccggccaatcgtaagaaaaactcataccagagtaatcttgctggaacgcgttgggatgcctttttttcttacaaaatgcagacgcagaagatggtttcttcttggagctgtggtcagcgtttttttgttgatgttttatacgtcctatatttgggatgttcattttgaaggcaatgaaaaatggaccgatgaggtgctgcttcaatttctggagcaggaacacatcacaccggccatgccaaaagccaaaatagactgttcagaaattgttcgaaagatcagacagaattatgatgatattgtatgggtttccgcatctattgacggaagcagattaaacatacagattaaagaaaatgaagatacgtttcgcggggggcaaaaagaagaaaaaccatgtgatctgatcgcagaacgggatggggtcattacaaaaatcgtgactcgttccggtgttcccatggttcatgagggggattcggtgaagaaaggagatcttcttgtgtcagggcgtatcgaggtgtgcaatgatgcaaaagaagttgtgggatatcagtatcagcaggcagatgcagatatccgtgcagacacacaaacggtatatgcagatgagatcagtacatactatgaaaaaaagcattatcagaaagagaaacggatccagttttttacagaattcaaaaattgggagtgtaagattggaagtatcaaaaattcctttccaaacagtgagaaatatctgatgaagcggcagattacgctgggagaaaattttcatcttccagtattttatggggtgaaagttgtaaaatcatatcaaattgagaagaaaagatatacaaacaaagagattcagaaaaaattgagcgaaaatttcgaacaattttccgatgaattcgaggaaaaaggtattcaaatacaggaaaatagtgttaaaatacacataggtgagaaatctgcggttgcaaaaggaaccttatacctcaatgaagatattggaaaaaaagcagatacagaaattttagaagttgaaaggaataagaaggatgagtctttcagaactgataattgatataccagtggaacatgagaggaacgtatttggacagtttgattcttatgtaaaaaaactggagcgggcatttcatgtgacgctggttgccagagagggcaaagtaaagatactcggagaagcaaaaaacgcagagaaggcaaagcgggtgctggatcagctgaccgctttgtcggagagaggaaatgagatcacagagcagaatgtggattatgccatgtcgctggtctatgatgatcaggaagaggcaatggtagagatggatcgggatctgatctgtcacacgctgcagggaaaaccaatcaaacccaagacgttgggacagaagcgttatgtggatgccatccgggaggatatgatcacattcggactggggcctgcaggaaccgggaagacgtatcttgccatggctatggcaatcacagcatttcagagaaatgaagtagggcgcattattttgacccggcctgcaatcgaagcgggagagaaacttggatttcttccgggagatctgcagagtaagatcgatccatatttgcggccgctttatgatgcgctgtatcagatcatgggtgcggaaagctttgcgaaaaattcagaaaaagggctgatcgaggttgcgccgcttgcttatatgagaggaagaacattggacaatgcttttatcattctggatgaagcacagaacacgacaccggcacagatgaaaatgtttctgaccaggattggatttggctccaaagttgtaattactggagatgcaacgcagaaggaccttccggcggggacggtttccggtctggatgtagcagtcaaagtcgtgaaaaatctggaagggatcagcatctgcactctgacaagcaaagatgtcgtgcgtcatccgcttgtacagaaaatcgtaaaggcatatgaagagtatgaaaagaaaagtacctgtacaaagggaagtacaaaaaggagaaagtcatgagtttatatttagaagaagagggagaggttatacttccgtttgaaacagaagaagtggccagtctggtagtggaagcagcattggactatgaggggtgtccgtatgaggcggagatcaatcttttgttgacaaccgatgatgagatccatcggatgaacgaggaatttcgtcagattgacagggcaacggatgtgttgtcatttccaatgctggagtacgaaactcccggcgatttttcttttgtggaagaacagccggaagaggcgtttaatccggaatccggagagttgatgcttggggatattgtgatttccaaggagaaagtgcttgcacaggcagaggcttatggacattcgcccaaaagagaatttgcgtttttgatcgcgcatagtatgctgcatctgtttggttatgatcatatggaagaagaagaacgacttattatggaacaaagacagcgcgagattatggaaaaagttcagattttaagagcataacggaggagaccgatggcggatatacaaaagaacaaaagaagaaaaaaaaagtcaaaggaaaatgagtttttgatacagggagccattcttgcagcagcagcggtgattgtaaagatcataggggcattgtacaggattccgctgacgaatattatcggagacgagggaaatggttttcttggatatgcatatgagatttatgcgatggcgttgatgttatcttctttcagtcttccaattgcagtttccaagcttgtttctacaaagatggcaatgcatcagccaagaaatgcgtttcgtattttcaagtgcgcgatgatgtttgcggtttcagtcggagctgttgtagcactggcaatttttctgggagcggatatgatctccagacacctgatggagtcaccacttagtgtatataccttgaaggttttggcaccggcattatttatcgtggcagtacttggtgttatgcgtggttattttcagggaatgggaactatggtgccgacagcgatttctcaggttttagagcagatcgtcaatgctacggtcaatatcgcaggggccagtattatgatcaaagtggggatggaggtagcaaaaaaagcggacaaccctctgctgaaaccagcttacggggcagcaggaggaactgctggaacagctacaggtgcattggtggcacttttgtttctgatgtttgtgtttgtcctgttccaaaaagtgatgatgcgtcagatgagaagagatcgaacccgacatcaggacggatatggacagatcttgaaagttcttctgctgaccattgctccgattttgtttagtacagccatttataatatcaatcagatcattgatctgacattgtttgcgaaaatcatggcagcgcagggagttccactgaaagaatatatcattccacagggaatttatactgggaaatataataccttgatcaatattccgcttgctatggccaatggattggcagcgtctgtcattccggcactgacagctgcggttgccaagggaaaccgcacacagatgcagaataagatcaatcagacaatccgtctgaccatgctgatcgcaattccgtgttttgttggatttgtagtactggcgtctccgatcatgcagtttttatatggagattccagaacagaaccggcaatgatgctggcatccggtgcgatcacagtggtgctttacagttcttctacggtgacgaactcaattttgcaggggttggataaactgactgctccggcgaagaatgcattgatctcactgggagtacatttggctgctattctggtgatgttgattgttttcaaatggggaatttattcacttgtatttagcaatatcgtatttggactttgcatgtgtatattaaatatgaaagatgtctataaggcaagtggctttaggcaggacgttaaaagttgttatatcaagccgttttttgcggctgtgatcatgggaattgcagcatttgtggtgaacagggtgttgagttccctgattcccggaaggtttgtggcacctggtctttcgattatcattgctatgctggtgtatgcagtcgcagtggttcgtgtaggaacgctttcagaatcagatatgctggcacttccgatgggaggacgaattttgagagtctgtaaacggttaaagatttttccacaggagaagaatctggatgaagacgatgatattcaatatctggactgataagagcaacggtataaaataaaaataaaaagccaatactgtatgaaaaaaggagtcggacttttatgaagaaaacatactgtattggcttttttatggcattgtttgtatttgtcagtctgttggggatcggatatcaggtgagttatcaatatgtaatggacaggcaggcagtacggcagcaggaagaccagcaaagaagcgttgccgccaaaggaaaggcagaaaagaatgaagggtattatctggcagagttgcatggatatgttgtggtatatctgtcggatcaatctacaatctatgaatttacagatattctgtttgaagaacttcccaaagaagtacagactgatgtaaaacagaaaaagtatgtcaaaacagaagaggagctttacgcatttctggaaaattattccagctgaaaaacaccagggtagacgaaaaatgagaaatagtgtaagataagaaaagaattttgcgaaaggataaaattatggacgaacaaaaggtaaaaagaatcaatgaactttatagaaaatcaaaagcagaaggactgacggatgcagaaaagaaagagcagaaaatcctcagacaggaatatatcgatgcattcagacggaatttaagaagtcagctcaacaatattgatgtggaagaaaaggacggtacgatcgtcaatctgggagaaaaatttggaaacaaaacaggacattagaagacagatgttatgtgccagagaccgattggcagaccaggagtgggagacatacagtgacaggatcacagagcagatggtctcccatcctttgtttgtgcaggcaaaggaaatctggtgttatgtctcttttggaaaagaagtgtgtacagaacagattttgacaagtgcgtggaaagcgggaaaaagaaccgcagttccaaaagtgatcggaaaacgaaagatgaagttttattacatagaatccatggatgatctcaagacaggtgcatttggaattttggaaccaaaagaagaaagacaagaggcagagtgctgtctgggaaaagagtctgttttgatgctggttcccggtgtttcatttgatctgaaagggagaagagtcggatatgggggaggattttacgatgtgtatcttccgaaaatgcgaggatgtcatacgtgtggacttgcatttgaggtacagatggcagatcagatcccggcagaggaacatgatatccggatggagtatgtgatgacagaaaagaggtgctggaaatgctgacagggttaccgaatgatccgatgattcttttgagcgtagtcaatatgaagctgagagattattatccaagtctggatgcgctctgcgatgatatggatgtttcaagagaagcgttggaggagaagcttacaatgattgattatgaatacaatgaacgaaaaaatcagtttgagtagtagaagaaatttcatatggaacgcgaatacatataaatggagaggaatacaattcatgttggagaagaaacaaacaaagacgatagaagaaatattaaaggaaatggacctgacgcagccggctcctgcagaggaaccacagcgtcagtactattttatggaaaaggcacgccgtcttgtcagggcacaggcagaaacattgggacgcgcattgacgtttcatgttaccacctttgggtgtcagatgaatgcgagagattccgagaagctgactggaattctggagcagattggatatgtggaggaggaagaagaaaatcaggcggattttgtaatctataatacttgtactgtgcgggaaaatgccaatcagaaggtgtatggacacctgggacagctcaaccgggtgaaaaagaaaaacccacacatgctgatcggcctctgtggatgtatgatgcaggaaccggaagtagtggaaaagttaaagaaaagctatcggtttgtggatctgatctttggaacccacaatattttcaaatttgctgagctggttgcaaccagactggagtccgagcgcatggtgatcgacatctggaaagatacagacaagattgtagaagatcttccgagtgagcggaagttctcatttaaatccggggtgaatattatgtttggatgcaataatttctgcagctattgcattgtaccgtatgtgcgcggacgggaacgcagcaggaatcccaaagatatcattcgggagatcgaggctcttgtggcagatggagtggtggaagtgatgcttttgggtcagaatgtcaattcttacggaaagacactggaggaaccaatgacattcgcccagctgttgcaggagattgaaaaaatcgaaggcctggaacgcatccgttttatgacttcacatccaaaggatctttccgatgagctgatcgaagtgatggcacattcaaagaaaatctgtaaacatctgcatcttccggtacagtccggaagtacaaggatcctggaaaagatgaaccggcgttatacaaaagagcactacctggagctggtggagaagatcaaatctgcggttccggatatttctctgacaacagatattattgtgggatttccgggagagacagaggaagattttcaagagactctggatgtggtgcgcagggttcgctatgacagtgcatttacgtttatttattcgaaacggaccggaaccccggctgcagtgatggaagagcaggttccggatgaggttgtcaaagatcgttttgaccgcctattgaaagaggtacagagtatttccgcagaagtgtgcagcgtgcatacaggaactgtgcagcgtgtgcttgtggagtcggtcaatgatcatgacgatactcttgtgacaggaaggatgagcaataatctgctggtgcatttcccgggaggaagcgacctggttggaaaactggtggatgttcgccttgatacttgcaagggattttattatcttggtgagatggaagaacttcaggcataatatgaaagaaaagcgcccaaactatctgtatatgagtcgaaaagactcgcagatagggagggcgctttttgtgaaaaaatggagcgaaaatttatttttatgggctttgggtggaagcctgtactacggatttgaagttctttttcgcggattttcccactggagtatgttcctgcttgggggaatctgtcttttgttttgtgcgaaacaaggactctggacagggtggaaggagccgttgtggaaacaggtgctgtggtgtacgatttttgtgacagcggcagaatttattacaggaatgatcgtgaacaaatggcttggatggaatgtatgggattatacggggcataaatgccagctgtttggacaaatctgccttccgtttacgattattttttccgctttgtgtgcaatcggaatcttgctctcagggtatcttttgtattggttgtacggagaagaaaaaccacagtttcatatactttagagagacaaagcgcagacaaaaaagcctgctggcaggatttgggtaaagaacacattcgatcgtatcttatgggggctaaggatacaatcggttttttcttgaataataatcacaaatttgataagatgataaccgtacataagttggtatccttatttcttagagaaaatagaaactgagataaggagaacaattatgtggggaaaatttaaaaggaaaaagcataactaatgtccaaaaatgcttgaaatagagggaaatatgataaatacaaaagacctgacaccaatgatgcagcagtatattgagacaaaaaagcagtatcaggactgcatcttattttacagattaggcgatttttatgaaatgttttttgaggacgcactgacagcgtccagagaactggagattacactgaccgggaaaaactgtggacaggaagaaaaggctcccatgtgtggtgttccgtatcatgccgtggaaggatatttgaacaaactggtatccaaaggatataaggtagccatctgtgagcaggtggaagatccgaaacaggccaagggaattgtaaagcgagaagtcgttcggatcgtgacaccgggaaccaatctggatacccaggcgttggatgaaacgaagaacaactatattatgtgtattgtttatattgcagaccggtatgggctttcaatcgcagatgtgactacaggcgattattttgtgacggaattggaggaaagtgcaaaacttttggatgaaatctatcgttttatgccgtctgagatcatctgcaatgagtcttattatatgagcggtatggatctggatgatttgaaagaccggttgggaattacgatttattctctggattcctggtattttgatgatgcagtctgcagacagaagctgttggagcatttcaaagtgggatcgtttgccggattgggactggaggattatgactgcgggatcatcagtgcgggggcactgttgcagtatttatatgaaacacagaagaactctctggcacagctgacacatattacagcctatacaactggaaagtatatgatgttagacagctccaccagaaggaatctagagttgtgtgagacgctgcgtgaaaaacaaaaacggggctctcttctctgggtgttggacaagaccaggactgcaatgggtgcacgtatgctgcgcaaatatgtggaacagccactgattgagaaaaaagagattctccgacgtctggacgcagtggaagaactgaaagaacaggcaatcaacagagaagagatccgggaatatctttctcctgtgtatgatctggaacgtctggtgacaaaaatcacatatggctctgcaaatccaagagatctgacggcatttggaagctcactgtctatgctgccctcgattcgctgtatcatggatgatctgcacgcatcgttgttgaaagagacaaaagaagaactggatcctttggaggatcttgcagagctgatcaggcaggcaattgcagaagaaccgcctcttgctatgaaagaaggcgggatcatacgggatggatacagtgaggaagtagataccctgcgccgtgcgaaatccgaaggaaaagactggcttgccaaattggaggcagaagagcgggaaaagacaggaatcaaaaatctgaagatcaagtacaataaagtatttggatattatctggaagtaaccaattcatttaaagatatggttccggattattacacgagaaagcagacccttgcaaatgcggaacgttatatcattccggaattgaaagaactggaggacaccattcttggagcggaagataaattatatgcgttggaatatgaaatttattgcaatgtgcgtaatcagattgcggcacaggtggagcggattcagacaactgcgaaagcaattgcaaaagtggacgtgtttgcctcccttgctttagtagctgaacggaacggttatgtccgccccaagatcaatgaacagggtgtgatcgacatcaaagacgggcgacatccggtggtagaaaaaatgatccccaacgacatgtttatcagcaatgatacatatctggatgataaaaagcagaggatttctatcattaccggaccgaatatggcaggaaagtctacatatatgagacaggcggctctgattgttctgatggcacagcttggatcctttgttcctgcgtccagtgccaacatcggtctggtagatcggatttttacccgtgtaggtgcatcggatgatctggcatccggtcaaagtacctttatggtggagatgacagaggttgccaatatacttagaaacgcaacttccaagagccttttgattctggatgagatcggaagaggaaccagtacttttgatgggttatccattgcctgggcagtggtggaatatatcagcgacaacaaattgcttggggcaaaaactctctttgctacgcattatcatgagctgaccgagttggagggaaaaatccataatgtcaacaattactgcattgcggtgaaggaaaaaggagacgatatcgtgttcctgcgcaagattgtaaaaggaggcgcagataagagctacggaattcaggtggcaaagttggcaggagttccagatgttgtaattagccgtgcaaaagaaattgtagaggaattaagtgatgaagatatcacgactcgagtcagtgagattgcgtccagagaaaaagaacagaagaaaaagcagaagacaaaaaaatatgacgaagtggatatggcgcagatgtcgttgtttgatacagtaaaagatgatgatgttctggaagaattaaaaagtattgatgtgggcaatctcacacccattgatgcgctgaataccatttatcgtctgcagaataaattaaagaaccgctggtaggaagtaaaggagaatacagatgccgcagattcaggttttagatcaaattacaattgataagatcgcagcaggagaagtgattgaacgtccggcgtcgatcgtcaaagagcttgtagaaaattctatcgacgcaaaagcgatgtccgtcacagtggagattcaggacggagggatctctttgatccgtgtcacggataatggaagcgggattcagcgtgaagatatccgcaatgcatttctgcgtcattctacaagtaagatccgcaaggtagaagatctggcacatattgcatctcttggatttcgcggagaagccttgtccagtatttcagcggtgacaaaaacggaattgatcacaaaaacaaaggaagatccttttggaacgcgttacgtgatcgaaggaggcgcagaacagagtctggaagataccggagcaccggagggaacaacatttcttgtacggcagttgttttataatgtacctgccagacggaaatttttaaaaacgcccatgacggaggcggggcatgtgcaggatttgttgatgcgtctggcgctttcacatccggaagtttcctttacttttatcaataatgggcagacaaaaatgcggacatccggaaacggaaagttaaaagatgtcatttataatatttacggaagagaagcagcagccaatctgatcgaactggattattccatggatggtctgaggatgaatggatatcttgggaaaccggtgatcaccaggggcaaccggaattttgaaaattattttgtcaatggacggtatgtgaaaaatgcaatgctttcaaaagcaatcgaagacgcatataaagattttttgatgcagcataagtttccgtttgtcgttattcattttcagatcgatggagaaagaattgatgtgaatgtacatccgaccaaaatggaaatgcgattccagagacagcaggatgtttacaatattgtatatgaaggtgttcataggactcttttagagccggaactgattccacaggtagaggcgccggtaccaaaggaaactttgcagcccaaaagtgaaagcccgtttttattaaaacccaaagcagcgtctcagtcggaggagaacaaaatacaggagcaaaaagaagaaccgcatgatgaagcttattttatgaagaagatgaaggaaagagttctttcctatcatcagagaaatgcatcggcagaggttgccaaaagggaacagattttccgccctcagaatcagacagagcggatcaaagatgcaatttcccgcgcaaaagagatagaaaatacgcatccgaaacagctcaaaaagcagccggaagtgatccgggaaacgccggtttatgagacagcacccgtaaaagaagagcgagcagaacagttaaatctgtttgaagaacatctcctgaagcgggaaagaaaagcagaatataagttgatcggtcaggtgtttgagacgtattggctggtggaatttgaaaacagcctgtatatcattgaccagcatgcagcacacgaaagagtattgtatgagcgtacgctgaaagagatgaaacacagggagtttacatctcagtatctgagccctcctattattttgagtctgtcgatgcaggaggcacaggttttaaaggaacatatagatcggtttacaaggattggatttgagatcgagccgtttggcggggaggaatatgcagtgcgcgcaattccggacaatttgtttggaatcgcaaaaaaagaactgcttttagaaatgctggatgatctggcagacgggatcagtacgtctatgacgccggagttgattgatgagaaggtggcctcaatgtcctgcaaagccgctgtaaaaggcaacagcagactttctgcacaggaggcagatgcattgatcggggaattgttgttgttggagaatccgtatcactgtccacatggcaggccgacgatcatcgcaatgacacagcgggaattggaaaagaaatttaagaggattgtataaatgaagaaaccattgattatattgactggtcctacagcagtcgggaaaactgctgcctcgatcgggcttgcaaaggcaatcggcggagaaattatctctgcggattccatgcaggtatatcgccatatggatatcgggtctgccaagatcaaagtggaagaaatgcaggggattccccatcatctgatcgatgtgctggagccggaggaagaatttcatgtggtgagatttcagcagatggcaaaacaggcgctggaggaaatctatcagagagggcatatccctattgttgtaggaggaaccggattttatatacaggcattgctgtatgacattgcatttgaagacaataaggaggatcattcctatcgaaaagaactggaagagcttgcaaaaaaagaaggttcagaaagacttcaccagatgctgcagcaggtggatgaaaaagcggcgctcgagatccatgccaacaatgtaaagcgtgtgatccgggctttggaattttatcatcagaccggtgaaaaaatctcagagcacaatgcaaaagaacgggaaaaggaatctgcatataattctgcgtattttgtgctgaatgatatccggagcaatctgtatgacagaatcaacaaaagagtggatgtcatgtttgaggaagggcttgtagaagaagtacagacactgaaggaacgtgggtatacgagaaatatggtatctatgcagggacttggatataaggagatttttgcgtatctggaaggagaatgtacgcttgcagaggcaaaagaaatcataaaaagagataccagacattttgccaagcgtcagatcacctggtttaaacgggaaagggatgtaatctggattgaaaaacagaagtatggatatcaggaagaaaagatattggaaaagatcttgaaggaattacagcttcggaatatttatccacagaaagaagaggaactaaaatgaaaacatgtatgacagagatgatgtatgaaaaactgggaatttcaaaggaagtctatgactttggacagaaaatagaatcgggattaaaggaacgatttgcacagatggacgaagtcgcagaatacaatcagttgaaggtacttcatgcgatgcaggaaaacaaagtcagtgaggcctgttttaattatgccagcggttatggttacaatgatatgggaagggatacgctggaacaggtgtatgccagcacattccatacggaagcggcattggtccggccacagatcacatgtggaacacacgcactggcgctggcacttgcggccaatttacgccctggtgatgaactgctctcaccagttgggaaaccatatgacacgcttgaggaagtgatcggaatccgtccttccaagggatctcttgcagagtatggaatcacataccggcaggtggaacttttggaagatggatattttgattaccccgcaatccgggaagcaatcaatgaacggacgaaactggtaaccattcaacggtctaaaggatatcagacaagaccgagttattctgtagaaaagatcggagaactgattgcgtttatcaaagagatcaagccagatgtgatctgtatggttgataactgttatggtgaatttgtggagacgatcgaaccaagtgatgtgggagcggatatgatcgtcggttctctgatcaaaaatccgggcggtggtctggctccgattggtggttatattgcaggaagggaagatctgatcgaaaattgtggttatcgtctgacgtctcctggacttggaaaagaagtgggagcatcacttggagtgatgcagtctttttaccagggatttttcctggcaccgaccgttgttaacagtgcggtaaagggggcagtgtttgcagcaaatatttatgaaaaactgggatatggcgtgattccaaatggaacagaatccagacacgatatcatccaggcagtggagcttggaagtgcagaaggtgtaattgcattctgtaagggaatccaggcagcagctcctgtggacagttatgtcagtccggaaccatgggcaatgcccggatatgacagcgatgtgatcatggcagcaggtgcatttgtacagggatcttctattgagctgagtgcagatggtccgatcaagccgccgtatgcagtctacttccagggaggactgacctggcagcatgcaaaacttggaattttaaaatctttgcagagtatgatcgatgcaggagtgattgaagttggaaaactgaaataaaaaccggaaggagagactatgagaaaagtggttgtgatcggcggaggcgctgcagggatgatggcagcgatttcagcagcggagcacggagcatatgcagtgatattagagcataaagaccgggtgggaaaaaagatactttccacagggaacgggagatgcaattttaccaatctggtgcagacaccccagtgctatcgcagcgaaaatccgcagtttccctggaaggtcattgaaaaatttgatgagaaaaagaccatagagttttttcagaatattggaatatatcccaaaaacagaaatggatatttgtatccaaactcagatcaggccagtgcagttctggattcccttcgtatggaaatggaaagactttgtgtggaggtgcatacagaaactgaagttttggaaatcattccgaaaaagaatcgatttatgatcagaacaaatgcgggaaccgtatctgcagatcgtgtgatcctggcagccggatcaaaagcggctccggtgacggggtcggacggatcaggatatgtcctggcgaaaaaactggggcatcgtatgatcccggttcttcctgcactggtgcagctcaaatgcagtgggaatttttttaaaggcattgcgggagtgaggattcaaggctgtgtatctttgtatgtggaggaaaactgtgtctgtcaggataccggggaaattcagttgacgcagtatgggatttccgggattccggtctttcaggtgagtcgatttgcagcacaggcactttacaaaaagcaggaagtaaaagcagttttgaattttatgccgcagatgtcagaagctgagtttgtccatttcttggaaatgcgcgccagaatgcgtccacataaaaatgcagaagcatttttgacaggactatttcataaaaaaatgattgcattgtggatgaaatgcggtcatttttcaaaagaaaaagaagtcggaacttattcgaaggaagatttgaaaaaacttgtgcgtctgatccagcagtttgaagtgagggtcgaagaaacgaattcctttgaacaggcacaggtatgctgcggcggtatttctacgcaagaggtgagagaggacacactagaatcacgatatgtaccgggcgtatattttgcaggagaaatcctggatgtggacggaatctgtggaggatataatctgcagtgggcatggtccagtggatggattgcaggaagagaggcggcagatgttaagaattagtcagttaaagatcaaggtaggacatagtcaggaacagctgaaaaaaaagctggtgcgggaactgcgcattcatccggaagatcttctgcagtatgaaattcgcagacagtctgtggatgcgagaagaaagccggaattgcactatgtatacagtatagatgtgcaagtgaaaaaagaaaaagaagtgcttaaaaagcatctgaaaaatgtgcagaaagtgcaggatacagtttatcaggcaccgacactggaaaaagacgtgccagaacagagaccggttgttgtgggaagtggaccggccgggctgttttgcgcatggatccttgcgaatgcagggtgcaggccgatccttctggaacgcggagcaagtgtggaagaacggcagaaagacgtggagacattctggaaaacaggaattttaaatcctgcttccaatgtacagtttggagagggcggtgcaggaacattttcagatggaaagctgaatactcttgtcaaagacagcagaggaagaaatcggtttgttctggagacgtttgtaaagtttggagcgccggaagaaatcctgtatgaacagaagccacatattgggacggatattttaatttctgtcgtcagaaatatgagacttgcgatttgtgcagcgggaggagaggtccggtttcacagtcaggtgacggatctgcttctttccgaagaccgtgtatccgttacaggagtgcaggttaaccagatggaagttatagaagcggataccgtggtttttgctgtgggacacagtgccagggacacatttgagatgctttatgaaaaacatattccgatgcaggcaaaatcctttgcggtaggggtgcgcgctgagcatcgacaaaaaatgatcaatctttctcagtatggaagtgaagatgtgccagaccttccggctgcgccgtataaagtgacggcaaaactggaaaacggaagaggcgtctattcattttgtatgtgtccgggcgggtatgttgtcaatgcttcttcagaggaagggcgtcttgcagtgaatggaatgagttatcatgcgagggacggagaaaatgcaaacagtgcgattattgtaacagtgactcccaaagacttcaaaaatgaacatccgctcgctggtatcgaatttcagagaaaactggaagaacgggcattttctgcaggaaggggaaaaattccggtccagagattggaagatttttgcaagaaccagataaccacttcttttggaagtatccggccacagatgaaaggtgagtttgcctttggtgatgtacgtggaattttcccgccggtgctggcagagtcgattgaagaagggatccgtctgttcgagcataagatccatggattttcgaacggagacacactgctttccggtgtggaaagcagaacatcttctcctgtgaaaatgccaagaagtgaaacaatggaaagtgtaatcaggggcttctttccgtgtggagaaggggctggatttgcaggcgggattacttctgctgccatggatggaatgaaagtggcagaggcagtacttcaaaaatacaatgagaactggtcatagaatcttcataaaattttaagaggtcagacctatacatgatttttaaagtgtgctaaaataaatcactgtattgtgttatcattcatattttatgaaaaaagcgaatgtgatcaaagagataccatgtgaagaacgcccctatgaaagatgcgagcagttcggagcaagcaatttgacagacagtgaattacttgccgttttgctgcgtacagggacgagaggagagaatgcgcttcagttggcagataagatattacatcctgtattttcacagaaaggagtgttgaatctccatcagtggacgtacgaacaactgatgcagatcaaggggatcggaaaagtaaaggccattcagattttatgtctggcagaactcagcagacggcttgcaaaggcaactgcacaggagggactgaatttttccaacccggcatccattgccagatattatatggaagatttaagacatgcaaatcaggagcagatgaagctgctgcttttgaacacaaaatccagactgatcggggagacggatatttcgaaaggaaccgtaaattcagctgtgatttctccaagagaactgtttgtagaggcactgcaaaagaacgcagtgtccattgtgcttttgcacaatcatccaagcggagacccgacaccgagtaaagaagacgtactgatcacaagacgaattcaggaagcgggattgctgatcggtgtggaattgttagatcatatcgtgatcggggataattgttatgtcagtctcagagagaagggattgatccgatagaactgcaataaggggacgaatgcgcatgttcaaaaatgtatatggcctggatttaggcacatatgagattaaaatatatgacaagagaagagacaggattcgcagaacaaaaaatgtaattgcgatccaggatgaaaaagagatttttgcaattggaaatgaagcgtatacaatgtatgagaaagcacctgagaatattcaggtgctcttccctatgcacagtggagtaatcgctcgttttgatgagatgcagtatttgttgcatgcagtattaaaacgggagggaatgcgcctgaatggggcagagtatgtgattgcagttccgacagatgtaacagaggtgcagaagaaggcgttttacgatctggtgtatcattccgcagccagagcaaagaaagttcgaatcgtagaacgtgcaattgccgatgcgcttggtatgggaataaatgttttcaaagcgaaaggtctcttttttgccaatttgggagctgagacaacggaactttccattctttccagaggtggactgataatgagccggctgctgccgatcggaggcagaaatcttgatgatgctgtgactgccagtgtgcgtcataacaaagaatttttgatcgggagaatgacagcggaacagctcagatgtcgatccggggttctcggcaaggcttatcccaagcggctggcagccgcaggcagggatttgactgtgggaatgccgggaacagaagcaattcctgttggattgatccgggctgcgagcagaaactttctttctgatattgtaagagagatggagaatatgatggatcgtacacctccggatataaggcgggagattacaaagaacggaatttatctcacaggcggagtggctgctttacaaggtctttcggagtacttgatggagcgtatggggattcctgtcactgtggataaaaatccgcagctgtgtacggtcaatgggctgcgtacgatcattttagacaaatattacagagacctggcatatacaatgtcagatgaagattataggtggttgaaataatatgaagaaaaaaaatcgaaaatctaagtcaaataaatattggcttttgggaatgagccttttttgtattttactgatgatattttctgtgtttgcagaaaaagtggaaggtccattccggggagtggctgatattacggtgattccgatgcagaaaggcatcagtcagatcggtacatggatcggagatgtcagtgagaactttaagacaatgaaacagctgaaaagtgagaacaaaaagcttcaggagcaggtagatcagctgaccacggaaaatagtaatcttcaggaagaaaagtacgaactggatcggcttcaggatttgtataagctggatcagacatatgcagagtatccaaaagtgggggctcgtgtgatcgggaaggattctggaaactggtttagtacctttacgattgacaaaggaagtaaagatggtatcaaggttgatcaaaatgtactggcaggaagcgggctggttggaatcgtaacggagacaggaccgacctgggcaaccgtgcgggcgatcatcgatgatgcaagtaatgtcagcggaactgcactgtctacttcggataaatgtatggtaagaggagacctggcattgatcggagaagggaaaatccggtttgagcaaatggaaaacaatgatcatgacgtagaagtgggagagcagatcgttacttctcatatcagcgacaagtatctgcagggtcttttgatcggttatgtcagtgaaatcaatgtggacgctaacaatctgacacgttcgggttatattactcctgtagtggattttaaaaatttacaggaggtgcttgtaattacaactaccaaggcagaaatgacaggcacagatcaaaatgaataggagaaaggagccggctaaaatgaaaaaagacaaatggaaacgatttgtgatcacgggaatgatgatgcttgtgtgttatctccttcagtgtacattgctcccgtctctggaactggcatcggtgaaacccaatctgctgctgattgtgaccgcgtcttatggatttatacgtggacttaaaacggggatggggatcggcttttgtcttggactgctggttgatattcagtttggaacggtgctgggactgtacgcattgatttatcttttgatcggttatgtgaatggtctgttttgtgagaactattttgatgaagacatcaagcttccgttattgttgatcgcaggaagcgaatttgtatatggactgttgatttattttttgatgttcatgctcagaagcgaatttgattttttgtattatctgatgcatgtgatcatcccggaactgatctatacagtgggagtgactcttattttgtatcagttgatcctgtggatcgaccggaaactggaagcagaagaaaaaaggagtgcaagtaaatttgtttgaaaaaataaaagaagtatttcatcgtattgtaaattcccgtctgactgttctgatccttgcattctgtgtaatgtttgcaattttgctgaacaggctgttttatctgcagattgtaaaaggggattattatttgaacaactataagctgcagattaaaaaaaccagagagctgacaggaacaagaggcaatatttatgacaggaacggaaatctgctggcatataatgagcttgcgtattccgtaacatttgaggataatatcaccaatggttcgaaaaaaaatgatacgatcaatgggattttagaaaaggtgatgcagatcgtagaagctcacggagatgctgtgatcagtgatttcgggattgttttagattcggcaggaaattatcagtttttgcagacggatgagacattgaagctgcgatttattgcagatgtttatggaaaaaagacaattgatgagctttctgattcacagaaaaatcagtctgcggaggatgtgatccattatctgtgcacggatgagacgtatggctacggaatcgatgataagaagatggaaaagagccaggttttaaaaatggtaaccatgcgttatgcgatcggacttaacagttttcaaaagtatataccgacagtattggcatccgatattagtgacgagactgtggcagcgatcatggaaaatctggatcagatggacggagtagacattgcggaagattctctgcgacgttatacggacagtaaatattttgcttcgattatcgggtataccggaaaaatttctcaggaagaatatgatgcgttgacaaaagaacagaagaaaaaatattccctttctgatattgtcgggaaatccgggttggaacagacgatggatgaagtgcttcagggaagcaaaggtgagatcagttattatacggacagtgttgggaaggtaacggatacagtgagtaaaaaggatcccggagcaggcaatgacgtgtatctgacgattgataaaaatctgcaggagcagacttatcagttattggaggaaaagcttgcgggaattgtacgatcgaaacttcgcaatgtgatgaattatgatccaagtacgaccaatgatgcaagtgagattatcattcctgtggatgatgcctacaatgcgttcattgccaacgagattctggatgagacacattttggtgcagaagatgcaaagccggtagaaaaggcggttcatgagatttttgtgaatcgaaaggaaagtgtgatccaggggattctggcagaattaaataatacaggcgcggcagcatacaaagatttatcaaaagaaatgcaggcatatatggactatgtatgtgatacggtactcgcccagaatacagggatcttagatatggatttggtggatacaaaggatgagacatatctttcatgggcaaaagaagaaacgatcagtctgaaccagtatttaaactacgcgatttcaaagaactggatcgatacgtccaaactttcagaggaggtatctgagcaaaaatattctgattcaggagagatttatcaggggattttgaaatttttagaagaatatttgaattcagacataaatttcgacaaacttctctataaatatcttataaaatcagagggtatcagtggggcacagatctgtgctatggtatatgagcagggcatacttccgatggatgaggcagcatacaatggcctgaacaacggaagtgtaaatccgtatacctggttgtgccagaaaattgaaaatctggagattactccgggacaactggcgctggagccttgtacaggatcggctgtagtcagtgatccgaatacaggtgaggtgctggcatgtgtatcttatccaggctatgataataatcggttgtctaatacgatggattcgaaatattacaatcagctggtgactggtttatcaagaccattttataacaatgcaacacaggaacgtacagctccgggatccacatataagatgctgacagcagcagcaggactcacagaaggaatcgtgacaggagatacgacgttttattgtaccggagttttcgataaaatcacaccgaaccccaaatgctggatttatccgggagcacatggttatgagaatgtagtaactgcattgcgggattcttgtaatgattatttttataacatcggatatgaacttggcatgaatggggaagaatacgacagcaataaaggcacagacacacttgcaaaatacgcagaagagtttggactgggagaaaaatccggagtggaaattccggagagcgctccacagatatcggatgagtattctgtgcaaagtgcgattggacagggaaccaacaattatacagtcagtcagttgaatcgatatgtggctgcagttgcaaatcggggaaccgtacacaagttgactttgcttgataaaacaacagatgtaaacggcaaagtgatcaaagagtacgaaccggaagtaacaaataccatcgatgaaatcagtgacaatacatggaacctgcttcatcagggtatgatcgcaatggttcaggatatgcctcagtttaatggaatggaagtttccatggcgggcaagacgggtactgcacagcagagtgaagtacatccggatcatgtactttttgttggatttgcaccggcagaaaaaccggagatcgcaattgccgtgcgaattgcaaatggatatagttccgcttatacagcagagatcggaagggatattgtcaagagttattataagacatccgattccgataaacttatcacaggaaaagctgcacagctcggtgccgttttggccggtgactaaaaaggatgtgaggtacatggacaagctggtgatgctcaaaagcagccggtacggtctggagatccatctaaatccacaggcggaatttcaaaatctgcttcaggagatggagcggaagctgaaggcttctatgaaattttttgaaggtgcaaagatggcggttgaatttaaggaccgtctgctttcacaggcagaggaagatcagttattggatctgatctcaaaaacagccgggattgatgtggtctgtatcatagaccgtaatcaaacaaaagaaatggcatacaaaagtgtaatagaacacacaatgaccaatgtccggcaaaaggatggtcagttctatcggggaactctcagaaaaaggcagattctggaatcagacaccagtatgctcatacttggagatgtagaagagggagcaaaggtgatcgcaaagggcagtatagtcgtcctgggcaggctggaaggatctgtccatgcaggagtctgtggagatcgagatgcctatgtggcggcattgtctttgcggccgggacatatgcgcatcggaggtgtcaaagcaggcagagctctgcttgccttctgcagacagacttcgcagcatccgcagatagcagtcctaggggaaaacagacttgttctgaatactctgtagacaaattatgaacttaagtgtgaaagggagaatagacatgggagaagtgattgtcattacatcgggaaaaggcggcgttggaaagacgacgacaacagcaaatataggaatcggtttatcacggctgcagaaaaaagtagtagtgatcgatacagatcttggtctgaggaatctggatgtggttatgggactggaaaacaggatcgtatataatcttgtagatgtgatagaagggggatgtcggctgaagcaggcattgatcaaagataaacgatttccggagttgtatttgcttccctctgcacagacgaaagataagactgcggtttctccggagcagatgaaaaaattgatagaagaactcaaaacagagtttgattatattttgctggattgtccggctggaattgagcagggatttcaaaatgcgattgccggagctgacagagggattgtagtgacaacaccggaagtatctgcaatccgggatgcggaccgcatcatcggacttctggaagcacatggaatcaaaaacaatgatctgatcatcaatcgtcttcggattgacatggtgaagcgaggggatatgatgtctgtggaggatgtgacagaaattctggcaatccaccttttgggggtaattccagatgatgagcaggttgtgatcgcaaccaatcagggagaaccaatcgttggagatgactgtatgtctggaaaagcatattccaatatttgccgcaggcttcttggagacgacattccgattatagattttggaaaatcagaaggattgttctcaaaattcagggatttgtttaaaaagaattaggggggatcagatatgagtgtaccatctgttcatgttgcaaaagaccggcttcggaatctgcttattgcagaccggcttatgtgtacacccgatatgtctgagcgaatgacgtcagatatatattatacgatctcaaaatacatagaactaaaaccggaagcggttcagattcagataacacattcagatatacatattaaaataacgggagaaaataattgaaacttcaatttttaaatcttaaacagagatacaatttgaaagattataaatttagcctggtcctgctggtcttggcagtttctgtaatcggcgtatttatggtaggaagtgcaaatgcagagtaccagccaagacagattatgggattaggacttggattgttggccatgatcatgatttcgctgattgattataaatggatcctaaaattttactggttgatgtatatagtaaatatagcactgctgctggctgttatttttctcggaacagaagcaaatggtgctaccagatggctggatcttggttttgtacaatttcagccttcagatttgacaaaactgatcacgattttgttctttgccagatttttgtcagacagagaagcggtgatcaataagaagaaaaccattctggaagcaattggcctgatcgtaccttcgttaatcttggtatataagcagccaagcctctcggcaaccatttgtattgcagcactcttttgcgtgatcatgtttattgccggactgagctataaatttattggcacagttctggcaattatcattcctacgattgctttggtaatcgggattgttgtacagcccaatcagccgtttttgaaagactatcagcaaaaacgtattctggcctggctggaaccggaggcatatgctacggaggaggcatatcagcaattgaattctgtaatggcgataggatcagggcaattgaatgggaaaggatataatagtgatgcgacaacctctgtgaagaacggaaattttattctggagccgcagacagactttatttttgcaattattggtgaagaattaggatttgtgggttgttgtgttgtcataattttgttattattgattgtgatagaatgtattgtaataggtttgcgggcaaaagatactggaggacgtattatctgcgggggcgttggcgcactggtaggaattcagacatttattaatatcagtgtggcaacaggaatttttcccaatacaggaatatcccttccatttgtcagttatggactgacatcccttgtctgctttttcatggggattggattggttctgaatgttggtctgcagcctaaaaaatatcaatagaggagacgaaagtgtatgaacataggattagtggcacatgatgcaaaaaagaaactgatgcagaatttctgcattgcatacagaggaatattgtgtaaacatagcctgtatgcgacagagacaactggaagactggtagagagtgttaccaatctgagcattcataaattccttccggggcatttgggaggaaatcagcaacttggagcacagatcgaacacaatgaaattgatcttttgatcttttttagagatcctctcgcaccgaaaaagcatgaaccgaatgtaaatgatattgtgaaactgtgtgatatgtataacattccaatggctacgaacattgctacagcagaggcattggttctggctctggacagaggagatttggactggcgtgaaatctacaagtaaaaagaagaacaggagaaaaggcccagagaaaaaaagcgggattggaaaaggtgtaattgcaggaattgttgtggcggtcatattgtttttggcactgattggaattcttctgttgattctgcaggacaacgaaagagcgtttgtttccgaatatgagaagaaccattatcgagagaatctttataagggagaaacatttgcctctcagttgtgtgtaacagatacagatgtatcgatggagggatatcatcaggaagcatcacttcatgcagttggtttgtttgatctggaagggaaaaatgtactttacgcaaatcgcattttagagccgttatacccagccagtacaacaaagattatgactgcgtatgtggcattaaagtatggaaatatggaggatatcgtcacagtcagtgcacatgcaacagattttgcagaggatgaacaggtatgtggtcttcagaccggagatcagctgtccatgaaagatttgatcaacgggttattgctttattccggaaatgattgtgcagttgcgattgcagaacatgtatcaggcagtgtagatgcatttgtccaaaaaatgaatgaggaggcgcgtattcttggagctaccagaacacattttacaaatcctcatggactgcagaacaaggatcattatacaacggcatatgatctgtatctgatgttcaatgcttgtttacagaatccacagtttgtggagatcattgctcagacatcctacacagctcatcttacttcttctacaggtgaagcatatactatgctctgggagcctacaaactattatgcgtccggggaagccatggcaccagaaggtgtcaaggtgatcggtggaaagaccggaacgacagatgaggcaggagcatgtctggtattgtatgcgcagaatgaacagggaaaaccctatatttcgattgtgatgggtgctcctcagaagcctgtcctttatgataatatgacaagattgatggatataggaatttgagaaaaataaaggattgacggcagttcacttggaactgccgtttttatataaaaatgtaagatttaagatggttacatatcacctgctgaagatttgattctgccaaaaaaactgatcagataaagtccgcacaaaccgacaagagtgtaaatgattctggaaagccagcttaaatttccaaaaaggaatgcaaccagatcaaattgaaagatgccgacaagcagccagttcactgctccgacgatgacgattacaagagctgtattatcgagccatttcatgctgtttcctccttttctatgggataattttattattaccgtaaaaactggaaatatacatacaaaaatgttatacttaataagttattcgggtgattcaaactgattttgaggaggtagaaagtttgccagaaagacaaaaaaagaattcaatcagtatcaataaatataaaacaaagagagagttgaatatcggaactttgatctttgcactggtctttatttatttgattgttgcagttgttgcgtatgcaacagaaaaacggatcacagtatatgaagtgcgagaaggaagtattttgaaaaataactcttacacagggcttgttcttagagaagagacattagtgtatgcagaaggtgacggatatgtcaattattatcagaatgggcagagcaaagtcaggacagggatgaatctttgtgcaatttcagcgcagaaacttggcaatttagaacctgaggagcagaatgagacagcactaagcgcagaggagcaagccgttattgtgcgaaaagcgcaggattttaatgaaaattttacggcacaaaaatttgcttctgtttatagcctgaaacgagaagttgaagatacgatccagaacgcatcggatcagacaaagacagcacaacttgacgcattgatttctgcaagcggacaaaatgtaaagacatattcagctgcaagagatggcgtgatggttttgacatatgatggagaagaaggattgacgcaggagaattttacagagtctgattttgacaaaagcaattatacaagtatcaatttagaagataatatggaagtacaaagtgggcagccaatctacaagctggttaccagtgaaaactggtccgtcgtaattccattgaatgatcaaatggcgaaagagttgtcagaaacagattctgtcaaagtacggcttgataaagaaaaagatacaatctgggcagatttttcggtgataaagaaggaaaaacaatattatgggtgtctgaattttgataaatccatgatacgttacgcggacaaacgatatttgcatgtagagctgattttggaggatcaaagtggtttgaagatcccgaaaagtgcggtagttcaaaaaccatgttatgcaattccgcaagaatatcttacaaccggcggaaatagttcggattccggagtgatggtacaagataaggacagcgcagtgtttcagcaggtcgaaatttattacgtatcagaagatgggacaaattacatcaatccagagagtcttaagagtggaagtgttttgatcaagccagagtcatccgagacgatgactgtggaagccacagaaaaactgagtggtgtgtataatatcaatcagggatatgcggtatttcgcgcagtcgagattctatgcgaaagtgatgaatattacattattagagaaggaaattcatatggtctgtccaattatgatcatattgtgcagaatgggcaagacgtaaaagaaaatgaggtcgtattttaagatggaaaggagattacaaaatgttgaaagaacagctggaagaggtagagcgtcgcatacaggcagcatgtgatcgggttggaagaaagcgggaggaagtaacgctgattgcagtaagcaaaacaaaaccagtgtccatgatcaaagaagcatatgaacttggtatacatgtatacggtgagaacaaagtgcaagagctgacagaaaaatatgaagttttgccaaaagatatcgaatggcacatgatcggacatctgcagacaaataaagtaaaatatattgtcggaaaaacggcgctgatccattctgtggattcactgaaacttgcagaaaccatcgaaaaagaggctgcaaagaagaattgtgttgagaatattctgatagaagtaaatgttgcagaggaagaaagcaagtttgggctgaaagttgatgaagtaattccatttattgaaaaaatttcaaaatttaaacatatttgcgtgaaggggctgatgacaattgcaccttttgtggaaaatccagaagacaatcggtctgtttttgcaaatttacataaattatctgttgacattatgaataaaaacattgataatgttaacgtaagcatactttcaatggggatgaccaatgattacgaaattgcaatcgaagagggtgcaacgatggtacgtgtcggtaccggaatctttggagccagaaattatcagatttaatttccggatgagaaagtaggttttcaaaaatactttatgcaaaaagcgagcagcataagaataggagtgtaaacatgggtgtatttgataaattcttggatattatgaaattgaatgatgacgaatacgatgacgacgatttttacgatgatgattttgaggatgatgattttgaagaaaaaccgcatcgttcaatttttggtagcaagaagagcagaagtgatgagtatgatgactttgatatggatgaggacaagcatcttgcaccgtcttcaggaaataaagtgacaccgatgcgtcagccggcgtccagaagaggcgtgaatatggaagtttgtgttgtaaaaccgacttctgtagatgattcccgtgagattacggagacacttcttgcagggcggacagtaatcctgaatctggaaggaatggatctggaaattgcgcagcgtatcattgattttatttcgggagcaacttttgcaatcagcggaaatctgcagaagatttccaattacatcttccttgtgacaccaacaaatgttgatatatccggagatctgcaggatcttctcggtggttccatggaaaaaccaagcatgagaggcagatattaggatttgtatatgcagaaggaagaacaacagttggagaaacggctgtcagagctatcgaatctggcatatagtcgtgatattgttacatactcagattttttaaatttgaatgaacagaatattttgcatgcaatgccaaaggacagactctatacaaggtttgttacctttggcggatatggcttggcagagcgtcagatggcggcatttctccctgatgctctttctttgcgtggagaaacagagtggtattccgaggagcaatggatagactatccgtttgatatcctcaaaattagtccactgcatgccaaatatgcggaaaaactgacacacagagattatctcggaacgatcctgggacttgggatagagcgtgcaaaaatcggagatattctcgttgatggagcggatgcggttgtttttgtgcatcgtgccttgaaatcctttttgatggaggaactgaccagggttcgtcatacccaggtatttgtaaaagaaattgccagagatggatttcaatatgaaccgagctatgaagaaattcgtgggacagttgcgtctgtccggctggatagtttgctttctttggcattttcggcttccaggacaaaactttccggcttgattgaaggggcaaaggtgtttgtaaatggaaagatgattacatccaacagctatcagctcaaagaaaatgatgtgatctccgttcggggatatggaaaattccggtataatggaactggagcgaagacaaaaaagaacaggatttatgtatctatttataaatatatttaacaagacaggcaggacataatatatggaagacagaaaaaaaagaggaaaaagttatttgtgggcattggcggcatttgcattggcggtagcggcggatcagtttacaaaatggctggcagttacttatttgaaaaatcaagatccgtttattgtaatacctggagtgtttcagtttcaatatctggaaaaccgcggtgctgcttttgggattatgcagaatcatcagtatgtgtttgcgatcggagcaatactgatatttctgattgtgttattgatttatggaagaattccgcaaaccagaagatttgttccacttaaggtatgtgcggtgctgttggcatccggtgcaatcggaaatttgatagatcggcttgcatggaattatgtgattgatttctgttatttcaatttgattgattttccgatttttaatgtggcagactgctatgtagtgattggctgtattctttttggagttctgatccttttttattacaaggatcaggaattggactgggtattgccgaagaaaggtgcccgatcatgagagaagagcgtttttttacagcagaagaaactgtagcagatgagcggattgataagtttttatctgctcagatgccggaaaagtctcgttcttatatccagaaactgatcaaagagggactggttgaagtgaatgggaaacaggtaaaagccaattacaaacttggcagtgaggatgaagtaaggctgcagattccagagctggagataccggatattctgccggaggaaattccacttgatattttatatgaagacgaggatttgcttgtagttaacaagccaaagggaatggttgtgcatccggcaccgggacattatacaggaacattggtcaatgcgctgatgtaccattgcagagagaatctttcaggaatcaatggcgtaatgcgtccaggaatcgtacatcggattgatatggatactacaggttctctgctgatctgtaaaaatgaccaggcgcatcagattttggctgaacagctgaaagaacattccattacacgaaaatacgaagcaattgtgcatggaaatctaaaagaagataccggtactgtgaatgcaccgattggaaggcatcctacagaccggaaaaagatgtgtgtacacgcacctcacgggagaacagctgtcacccactacagggtgctggaacgatttggacattatacgcacatcgaatgtgaattagagacaggcagaacacatcagatccgtgtccatatggcaagtatcggacatcccattctgggcgatgctgtgtatggaccagcaaaatgtccgtataaattacagggtcaaacattgcatgcaagaattcttggatttgtgcatccgtcgactggtgcatatatacagttcgatgctccgctgcctgagtatttcgaggaacttctgcaaaagttaaggaaacagacgggaaattaagggggaaaggaatctatttggattcctttttcatgtttaagagacaaacgtacgtttgcatcccgaaaaaatgaatacataagaggtgagaatgaatgaaacgattcagcaaaaaagagattttttcaattccgaacttaatgggctattttcgcattttactaattccggttttttgttatttgtatattacagcagagactgagcaggaatatttgtatgcagcactggttgttttcatttccagtctgacagatctgtttgacgggaagattgcgcggagatttcatatggtgacggagcttggaaaggcattggatccgattgccgacaagctgacgcatgcggcactggcactctgtcttgcaacccgctatcccttgatgtgggccttgattgcgctgatggcaatcaaggaagggtatatgggaattatgggaattgtgtttttgaaaaaaggaaagatgctggacggagcgatgtggtttggaaaagtttgcacggcagtcttatttgcaggtcttgttgttctgtttttctttttccagattccacatactttggcaaatgggatgatcgtggtgatgatggtgattatggcagttaccttatgcatgtatataccagtttttcaaaaaatgaaacatgaggagaagcaagatggcaaaaaataagtattatgtagtgagaaaagggcgtacgccgggaatttaccgcacctggggagaatgtcagaaacaggtgacgggatatccgggcgcagtctttaaaggatttgcgacagaggaagaggccaatgaatttctagcgggaatgcagagagaagaagcaaagcagatcgaaaaagaaaatggaatcaatcaggagacttatccatatgcgtatgtggatggttcttattttcagggaatctatgggtttggtggatttttaagactttcggaggatgaagaggttgtgctgcagggatccggagattatccggatcttgcgaaaatgcacaatgtggcaggagaattactggggtgtatcaaagcagtaaaagaagcacagatgcgaggtatttcggagctgaccgtgttttacgattatcaggggattgaatcctgggtaaccggagactgggcggcaaaacagccgggaacgcagaaatatcgggattttatgaaccgtacgccagtaaaaattcattttgtgaaagtgaaaggacacacaggtgtagatggaaatgagcgtgcagatcgcctggcaaaggaatcggtaaacaaaaaagtagcattcaatcagttaaagatagaataaaaataaaataggagagaaggggttcggctatgaattggaagaaaaaaaggtttctgccactggtaatagttgcagtgttgttgtgtggctgtcagcaaaatgcaatggtttcggaacagaaggggacagaaacggcgagagaaagcgggacattatatacgctccagaacatgccggaatattccggctccccgtatgtggagctgaatggaaatagtcctgattttggagaagaggagtatacaacagaggcttttgaaaattacagtgatctggatgcgttaggacgttgtcagactgcttatgctaatatttgccaggaaatcatgccaacagaagaacgcgggaagattggaatgattaagccctctggctggcatacagtaaaatatgattgtgtggacggaaagtatttgtataaccgtgcgcatctgataggatttcaacttgccggagagaacgcaaatgagaaaaatcttattactggtaccagatattttaatgttgaaggaatgcttccgtttgaaaatcaagttgcagattatgtgcatgagacaaatcatcatgttttatatcgtgtaacgccggtctatgaagaagagaacctggtagcgagcggagtgattatggaggcggcttctgtggaagatgcagatctccgttttcatgtatttgtttataatgtgcagccgggaatacagattgattatgccacaggtgaaagtaaggaaggcgaaacgcctgtcaatagtatggagaatatagaagaagccacgtttgtaatcaatacgaatacaaagaaatttcataaacctgattgtaacagcgttcttgatacgcagccaaaaaatcgcaaatcaacttcccaaacaagagaagaactgataaatcaggggtattcaccgtgtagtcgatgcaacccttaaaaagaacgatataaaatgtgggaaaatagtcgaaaaattatattgaaataaatagagctggcagttttttgttgttattttacctggattgttatataatatatataggaacttcaagaatatgacaggcagaaaaggagcgtgggcaatatgaagacgaacacgattattacaataggaagacaattcggaagtgcaggacgggaaatcggatatcaggttgcagattattttggaattaagctatacgataaagagatgctcagcagagcggcaaaagaaagtggtatctgcgaagaaatctttgaaacgcatgatgaaaagccaacgaacagttttttgtattccctggttatggatacatattccatgggatattcaggtggagcttattcagatatgccgattaaccataaagtatttcttgcgcagtttgatgcgatcaaaaagatagcagatgaagggccgtgtattcttgtagggcgttgtgcagactatgctttggaagcttatgacaatgtagtgaacgtcttcatccatgcagatttggatgcgcgtattcgaagaatagcgagaatttatgatcttacagatgcgaaagcgaaagatatgatcatcaagacggataaaaagcgtgcaagttattataattattatacaaataaaaagtggtctgactctggaagctatgagttgtgcctctcaagttcagaacttggaattgatggaacagcaaaggcaattgaacagtatgtgatgatgaaagagcagatcagtcgtgatgataagattttgtagaagttaatatgtaaagaagctgttgcataggagcgacagcttcttttttggggctgaaatagaacgatcactgttgagtgtttaacgttataaagcagttaagatcttggacgaagtatccgttctggccatccttcaatattgccgtcaaggactgcgtgaaacatacgctcacgaacaccgggattttcatgagttaattgtcggagaagttctttgacatattggcgtttcgtatacccgtctacagggcatttgcttttcactaccggaaggaaatacttgtttttaaaaccgatgacatctttttcatcaacaaacatcagaggccggataacagttaaatctgtgcgatccaagtatgtttttggagaaaaggaataaaaacgtccttcaaaaattaaagagagaagcattgtctctatcatgtcatctttatggtgtgcataggcaattttgttgcatcccatttcttttaccgcctggttcaaagcaccttttctcatcttcgcacaaagtgaacagggatttgactctttgcggacattgaacagaatatcataaatatcagaagattcgattcgataaggaatgttcaatttttgacataataactgaatcgaagttaggtcaaagtcctcaaatcctaaatctacggtaattgcgctgagttcaaattttttggggtagaagcgtttgagtccatgcagcgcataaagcaaggtaaggctgtcttttccaccggaaatccctacagcaatatgatccccgtcttcaatcattgtatattcatctactgcctttctggtgtagcttagtagtttctgtaattccatagtaaggtcaggtcctttctttcgttttatgtccttattatagtgtgatggaataaaaaatacaagttagtacattgtactattttgaaaatgcagaatagtacgatgtactaacttgaaaaaatgcgatttgcggtttcaagaggagtgtgatatagtgattttagtgaaagtaatatttgaagaggttggtaattatggaactacaaaagcaaaatgagacagtgaaggaaagaatctgcagttgtgctcgaaaattgtttatgataaagggatacgatcaagtatctatgcggctgattgcatcagaggcagctattgcagtcggaaatgtaacatattattttccgaaaaaagaagatatcctccgggaaattttaaaaagcatacaaacagaattttatgagaagatacatccatttgcgatcaatttggaaacacaagaaatatcaggaaaaccattttgggaatacgagaataaagttattttagaattgttgtttcgatttttaaatgtcgtggaacagtttcagaacaaagctgcgatcgtatatgagaattacagtattttggagaaaaaagttcctgcttttcgggagatgaacagcgaatggaaaaagcagatcatgacaatctacaatgtcttgatggaacaactgtgggagagaaggattttcagaaaagaactggaaaaaagcgaatatgaaaatatgatctatattttaaaattattgactttcttctggcaggaaatgcagaaggaagaaagtccggaaaagaaacggtttgtagaaagtatctgcagatttttgagcccttatatttcctgggaatggaaagaaacatacacagatctgtgcagagaaatctgcgaggtttctttccatagaaaatccttgaagtttatttgacaaaattccgaagctgtgtgaacagggtattcatgtcgaaaacgtctttttcatccagattcagagaaagcgtctgcgcattgtctataatctgctctggttttcgcgctccgcagagcacgtgcagatcgggcaaggaggcagctgtcagataaatgatcagattgctgagagaacaatgatatttttctgtgtacggggtcagtttcttcaggacatccagtacaagaatacgagattctggtttccagaatctgtttttgtttcgcacatctgttggagacagtacagtacctgtcgtcacctttcctgtaagaagcccctgttccagaggagagtatgcctgaattgaaatatggtgcttctggcagacgggtaataaatcttctgcaatatgtgtatccagaaggctgtatttttcctggataacatccagttgtccaaagctgcaatacttttctacaatttcagcagtgacattagaggctccgattgcacgaattttcccttcttttttcaactggagaagagtgtccatcgtttcttccagcggataaagggaaaagtcaggtgtttgccagtgtgtataataaatatcgatataatctgtctgcagacggcgaagactgtcttccagattttggcggatggaagaggcagaaagatcgcgatatacattgcggccttccatgactttgtgaaaacagggggtttgatgctcccactccaatccgcattttgtagagagcaggactttggatcgattccgctttagggctttaccaacgatctcttcactgtggccgataccatagacaggtgctgtatcaaaccatacgatttctcgatcaattgcttcttcaatcgtgcgtattgaaatcgcatcatcattttctccccaccaggtgccgccccctatcgcccaagttcccattccgatatatggagtttccaaattgcttcttccgattgtacgttcttttttcataaaatgcagatcctttctttgggtatgctatttgtaattatcagttcaagtctcacgcaaagtaacggcttttgcagccatgcggcgtctgtcttcatcaattgctgcatagtgctttttggttgtatttacatctttgtgtccaagtacatctgctacaaggtagatatcaccggtttctttatagagtgtagttccataagtacttcgcagcttatgaggcgtgatttttttgtttggtgtcacctgttgtgcatatttttttaccatattttcaactgcctgaactcccatgcggcgtcgttgtgtggataaaaataatgcgttttcatgacccgggagaggagtagcagcttcccgtgttgtatacagatattgttttaatgcatattctacttcctcaccgaaatagatgaccatctcatttccaccttttcgaacaacggtaattccattgttcttaaaatcaacatcctgaatatcaagtccgacacattctgatacacgaattccggtgccaagaagcaaggtaatgattgccaaatctcgattttttgttttttcataataagcttttttctgtccggtcagttcatctcctccgtgttctacaaaatccagaagagaagccacctcatctgtatcgagacggacaattgctttttcatgtaatttgggcatgtctacgaacagtgtcggatttttttcgatgatctgatgtttgaaataatatccgtaaaagctgcgcagagcggacatttttctggcaagccctttttctgtattggtaatctgtttttcttccgagttgtgataaacttttaaatattcctgatattcttcgatatcaacaggagacagttgttctaaatcctgtggagtaaactgatcgatcgtataattcttatataccggattgttttccatcagaaagtgaaaaaacacacggatatcataagcgtaagaaattctggtttttgcagaggttgtaggttcagcagcacgaaaataatcttttgcaaaaggcggcaatgttttcaaaatttctctcagacgcagtgtgttatcaatatacttttgttcatgataggtttttcgttcttttttttgattggattccataaaataaagtgcctcgttctttttttgtataaaggtattataacataatgaaatatagtcaacaatgacatctgcagatttcatattgtaaaagctgatataggcttccaaaaggtgattgccgcaagattcgtggttaaaagttcaatcttttggaaaaatcagtatttgtcgtatagattaaagtgtctttcaatactgctgttttgggagaattctggtcattgctgcgatcgatcaggaatctccactgtaagaggttctttggcaaatacatggcatcctaaccgatacccttcctgcaattgcttttctgaaaaccatatttgatccatggtattcacggcagcgtggccttttacaatccgtaccacacattttgcgcagttgcctcggccgccgcaggcagttagaatatgaatatcatgtttcagcaggtattcttgtaatcgtgtgtttgcgggacattctattaacatatggtatagattcctttcttcttttgatgttttgttatttccaatagatatattataaagtatgcaatttatactttcaacggtgctttgtacataaaaaagaaatacagccatatctggccgtatttcctggagtgaatttatatcaattacatggggtgtaaatgatacctgtattcgataaaaacaacttattcttgaaattctgttgtgtaataaggaatgatcaaatgctttccggtctgtattttttcagaatccagttgattgatctgctttaattcttctatatattcttttcggtccgattcagaatctgcgtaagtttcagcaagactccataaagaatctccaggttggatcacaatgcttttgtagtatttaaattcgaccggctcttctattcgtgtattctgtgcggaagacaaaatacttccaaataaaaagcatccgaaaatcaggacaaaggtaatcataattgttgacatctttttctcttttctcatttgtaaatccccctatagaaatgaaaacaagcaaaagaacatacgttctggatacatgataaagtatatcaccagaacgtatgtttgtcaactggattataggctgttttttcgtttactgctcttctgctgaattgatttgtctgtcagcaaactgtgaattgtataatttatgataagctccatttttttgtaacaattcttcgtgggttccctgctcaatgatgtctccattttccacgaccaggatcagatctgcattacgtatcgtagaaaggcgatgggcaatgacaaaagaagtcctgcctttcataactttctgcatcgcttcttgaagcatccgctccaggcgggtatcgacagcagaggttgcctcatcgagaattaaaattcgtggatctttcaagacagcccgtgcgattgtgagaagctgtttttctccctgagaaatgttgttggattcttcgttgattaaagaatcgtacccgtgactcagtgtcgaaatataatgatggatatttgccatttttgcggcatctacgacttcatcttttctggcggtcaaagatccgtaccgaatgttttcaaaaatacttccggaaaacagccaggtatcctgcagaacaagcgaaaataattttcgcaggtcatttctgtccatatcccggatatcaattccgtctattttgatcgatcccccgtttacatcgtaaaagcgaaggagcagattcatcagtgtagtctttccggcaccggtaggaccgacgatagcaaccatctgaccagacttaacctggaaactgacatctttcatcaaaagctcatctgtatagccaaattgtacgtgctcaaatactacatttccctgaattttggaaagatccagattaacactgcccttttgtacttcttctgtttcatttaacagtgtaaaaatccgattcattgccgcgtaagcagactgtacttgagaggaaagctgcgatacctgcgacaaaggatcgttgatctgccagatatagcggatgaatgcctgcagatttccaactgtgacggatccgttgattacaaagaaacttcccataacggcaatgcttccgattgtcaaataagtgacaagagagacaaaaggtgagatcagcgaggaaagaaactgtgccttaaatgcagcatcggccattttttgattgaccatggaaaatttttcggaagaatctttctgtctgttaaaaagaagaatttcgttaaacccactgtataattctgtaatggttccgtttagctctcctaccatcttctgctgaagatcaaacatacgctgtgaatgtttgacgaatccaaaggtaatcagcattgtcagcggaatgatcaaaagtgcagtcaatgccatccagacattgatagagaacatcataataatgacaaacaaaaacgtgaggatggctgcaaatacgcgtgagagcgtttgctgaagcgcattgctcagcgtatcgacatcgtttgtaacgctgcttaaaatatctccaaatgcatgatcgtcaaaatatttgaccggaagccgttggatttttttctgaagggcattgcgaatatcgtgcatggtgttttgaatggcatctgtcagaaaaaaagatgtaatcaactgggagatcgtttttacaacgtacagacagaacaaaattcccataaaccggaataatacagggaactgtacatgtgctcctggaattccattcagaatctgtacaccgtcttctgcaagttgtgtggtaattttcccttctatcataggattcagggcaaaggtcaggtttgttacaatgaccattgtcagggcaattgacagtttgatgcgatatggccggacaaatccgagcaattcccggatacatttccgaaaagtcagtttattttcatgcataagtcaattcctcctcactcagctgggatgctgcaatttcgtgataaaccgggcaggttttcagtaattcccgatgggttcccattccaacgatacgtccttcgtccagaacgaggatcttatctgcatccaggattgtagagacacgctgtgcaacaaggaaaacaatggaatttttgatctctggttttaatgcttttctcaaacgcgcatctgttttaaaatccagtgcagaaaaagaatcgtcatagatgtaaatttctggcctgcggatcaaagctcgtgcaatggacagtcgctgtttctggccgcctgagacattggttgcgccttctacgatcggttcctggaactggtgcggcttttccatgataaaatcatatgcctgtgcaatcttagctgcatggataatctcttccattgtggcatctggttttccaaaacgaatattttcttcgatggttccggaaaacagatgagccttttgcggaacaaaaccgattttattgcgaagcgtgtcgatatccagatcttcaatcgggataccatcgatataaatatttccggaagtacgatcgtaaaaccgggggatcagctggatcagggaactttttccggatccggtgcttccgataaaggcaacggtctctcctctttttgctgaaaatgaaatatctttcaatacagcttcgtcaccatccggataaacaaagtctacgtgttcaaatacaacactatgttcgtccgcaacggaatctgttttgacattttgcggagtgttttcaatcgaaggttttgtgtttaatatttccagaattctctttgccgagatatttgctctcggatacagcataaataccatgcaaaaaagcatgacagagaacatggcatgaaatagatattccataaatgcgaccagtttaccaacctgtaaggtctgggcatcgatcatgtttgcagctgtgaaataaatacacagagctgccagattcatcagaagaaaaaatacaggttctgtagaggacatcagtttgaacagattttgagattgtttcataaagtaactgttttcggcgtcaaaacgtttggactcatagcggtcattgttaaaagagcgtatcacacgaattccggtgagattctcgcggaaaatacggttgatgcgatccaaagagctctgctgtctgtcactgagtggtccggaaattttccctacgatcacaactcccagaatgatcaccggaactgtggacgcaatgatcaaagaaagttccagtgaggaacggatggtcagtgtaaaactgacaatgatcatgatcggggttaagagcgcagtacgcaagatgacatttagaaacatcataatctgaaaggcatcgttgtttgtgcgggtgatcaaagaggctacaccaaattggttcatctcgttgtgcgaaaacgtctgtactttttggaagacttcttcccgaatgtctcgggttacagatgttgaaattttagcacaacagtatcccagcaaaatggttcctgcaacgccaatgatagaaattgctgcgattacgaatcccatgcgaatcagatactgcttgtcctgatacatgatcccattatcaatcatttcagatacgatcgttgggattccgagttctacaagtgcaaatccgaatacagaaacgatgtttaagaaaagcagacacttgtatcgcttcagatagtgaagaatcagtttcataaataaattacctccccataaaatgtatggccgatcttccatattcagccatcttatctacaataaactatagggtgggtcgacggtcaaggaaaaattgaaaaaatctaagaaaaagtatgaatcgaacatattttccaaacaaatgtttgatttttgaaagtgcctatgataaaataaattaaataatgaatcgatttgaaagaactgcaggagggttatgatgtcaaaaggaacgatcacagacaaacagagggaaattttagaatatatcaaatcacagatattggaacggggattcccaccagcagtgcgtgagatttgcgaggcagtacatctcaaatccacttcttctgtgcactcccatttagaaacgctggagagaaatggatatattcacagagatccgacaaaaccaagagcgattgagattttggatgatgattttaatcttctcagaagagaagttgtcaatgttccgctgattggtcgtgtagcagcgggggaaccgcttctggcacaggagaatattgagaattactttccgattccggtggagatgatgccgaataaacagacgtttcttctggaagtcaaaggagaaagtatgatcaatgccggaattctggatggtgacatggttctggttcaggaggaacagaccgcagaaaatggcgatatggttgttgctctgattgaagatggagcgaccgtcaagacgttctatcgggaagaaggcgttatcagacttcagccagagaatgattttatggatccgatcattgtaaaagacgtttccattgttggaaaggtaataggagtgtttcggtttttccgttaaacggaaaggagctgccactttaacgatttcaaaatcgtgaagcgacagctccttcttttcatacggttctatttacaattcggaaagctctacctgttttccatctctccagatacgttccagatcataaaacagacggttttctttgtcgaatacatgaacgataatttcaccgaaatccataaggatccagttaccggaaccgtatccttctctttgtttcatatcatatccggcttttgcaagctcctcttctacattgtctaccagtgcacgaacctgactttcactgtttccgtttgcaatgataaagtaatctgcaagcacagatacctgagaaatatcgattactttgatatcttctccttttttttcatccagcgcctgatatgcaaggcgtgccatacgttttgactgttccattctgtttctcctttcagggtggtttgctttttcctatttacagggaaaattagatcgatttttatagtattgacaagttttttctgtcataggatcgacttttcttccagctctttttaagaaagcaagggtagattctgccgtcatacggacagcagcatcaatgtcatcaaatgccgcagcgcgtacttccgaaagccctgggatttttttgcgtccaggttcaatataatcagcaagatatacgattttttcaatgatagtcatgctgggtcttccggttgtatgatacgtgattgcattgagaatttcagaatctgtgatgccatactcctgtctggccaaatacgtgccgagttttgcgtggatcagtgcaggaacttctaattctgcgtcagatagttcaatgtcatgttttcgacacaatcggatttgttcattgacatcacaatattttccacaatcgtgcaaaagaccggcagtcatggatttttgaatatctgctccatggcgcattgccatggatgcagcagtatacatgacgccgagggtgtggatataacgctcttctttcagctttgtttccagcttttttcggatgacagttaattcggttgtcataatctctcctcttctcttttggtgtataattgcagtttctggatatagtctgcaacagaatccggaaccatataacggatcgatcttcggttaaacgctctgttccgaattgttgtagatgaaatttctagaagcggtgcctgcagaagctcgatttttgcctgataacgtttttccagatattggatctggcacttcatatcagcggaatctttgtcatctctcattgctgccagaatcgtacaggaaggaaaaatttctttgaaatatttccactgctctatggaaaagagagaatctgctccgagaataaagaaatattcattcccgggatacagttcatgaaattcctgtaaggttttatacgtgtaagaatgacagtccttttttgcctcatgaagggaaagtttaaaatatggagtatcacacaccgcaagtcgtaccatttcaattcgatgtgcaagagcttccttgctgtcttccacttctttatgaggcggattcccgttgggcagaaaccagacctcatccagatggcactgctcgtaggcaaattctcccaacaacagatgtccgatatggattggatcaaaggttccgcccataattccgattttcataaaaatctcctacggaagtacgatttttttcttatcgtcttttccttctttgtataatacgattttctttccaattacctgtacgacctgtgagtgagtacgctcagccaccatttctgccagtgcacgagggtcatcagcacagttttgcagcacactgatcttaatcagttcacgggcatccaaagcttcgctgatggcttgtgtaagacttggagtcatactggattttccaatctgaaagatcggatccatggtcatggcaaggctctttaaataggctctttgttttgttgtcatgatagttacatttcctcctgttaaactttatttataataatcaaactgcaggccgtacatctttacagtatcaccttcctgaatacctgcagcttccagctgatccagaataccggtttcttttaagaacttctggaagaatgcaaatcctttttcggaatccaggttcgtgtaaccgagcattttttcgattttcggaccttctacgacatacagatcctcttcttttttcacggtataaggaagttcttcgtatatcagttcatcttccgggaagaactcctgttcaaatacgattggagctgtatccatagtctggatctgttcacttacataataaagcagttcttttaatccctgaccagatacaccggaaattggaaatactttgatgccctgtggttcaaattcctcttttaaacgctggataggatcttcgtcttcgctgtagatcaaatctgttttattggcggcaatcacctgtgggcgtttggcaatttcaggattatacgcctgaagctctgcattgattttgtagatatcgtctaccgggtcacgtccctctgttccggcagcatctacgacatggatcatcatctttgtccgttcaatgtgacgcaaaaattcatggccaaggccaactccttcagaagccccttcgatcaatccagggatatctgcaatgacaaatccttttgcaccatccaggtctacgactcccagatttggatttagtgtggtaaagtggtaattggcaattttaggctgtgcattggtaacccgtgagaggaatgtggattttcctacattcggaaatccgatcagtccaacatcggcgattacttttaattccagattgacttccagttccatagcaggctgtccaggctgcgcatattttggaacctgcatagtagcagttgcaaaatgctggttaccaagtccgccttttccgccttttaatacgatctgtcggcggttgtctcctgacatatcagcaatgacctttcccgttttggattctttgatcacagttccttcaggaacacggagaatcagatctttgccgtcttttccgtggcactttcttttgccgccttcttctccatcgccggcagcatatttccgtttatgacgatagtcaacaagtgtattgagtccttcgtctacttcaaaaatcaaatcaccgcctcttccaccgtctccgccatccggacctccgtttggcacgtaaagttcccggcgaaagctgcagtgtccgtctccgccttttccggaacggataaatatcttcgctctgtctgcaaacattgttttttcctctttaaaaaatttagaatcgattgttttttgctttttcggtaccaaaatgtgtggtgtgttgttgttttacgaaaaagaagcctcagactaagaagtctgaggctttcttacggtaattattcagctaccggatagatagaaacctgttttttgtctcttccttttctttcgaatctgacaacaccgtctactaatgcaaataatgtgtcatctcctccgcgtcctacgttcacacctgggtgaatctttgttccgcgctgtctgtaaaggatatttccggcttttacgaactgtccgtcagctctctttgcacctaatctcttagcttcagagtcacgtccgtttcgtgtggaaccaactccttttttatgagcaaaatactgaaggtttaatttcatcatggttgttacacctccttgaaaatgatatcaatgtatggttcatattcgctgtcttcttctatttcctgtaacccaagaaccatagatttgaacagcagcttggcatcatgagaaggtttccggatgaaccgaaattcaatctgacctgtctcttcatcagaaacaagagaagtcttgtcccttgtgaagcgttcgattgaattgagtgtattgatgaccagcacagacactgctgcacagaccacatcacttcctgcttccgcataccctgcatgtccgattacgtccagacctgcataatcatgatcgactgtcttataaacggttaccttgatcatatgacagattaagcgttgattttttcaatcttaactgctgtgtactgctgtctgtgaccatttttcttatggtatccagtttttctcttatacttgtaaacgatgactttttttgcttttccatcaccaattacagaagctgtaactgttgcacctgctactgtaggctctccaacaactaatttgtcattgcttactgccagcacctggtcaaatgtataagtttctccagcttctacaccaagtttttctactttaatgatatcgccttctgctactttgtactgtttaccacctgttgctataattgcgtacatatggcacctcctattatcattactcgccagcttcggtgtctgaatcagaacttgtaaaacctcgctgtgcggcataccgtgtaagtatagcacgtgtattccgtataagtcaataggaagcagaaaaatttttcgaatatttttctgcttcctactattctatgcattatttatcgcattcattcagtttgtcataacaatattcaatgatgctgcgtcttgtgatgatgccaataaattttttctggtcatctatgacaggaacaaaattctggttcattgcacggctgatcagatctttcatatcagaatctgccgctactgcaatataatctgcttttcgttcaaaatcatgaataaaaatatgttcggcttctttgagattcagattggtatattttttcataccccagagcaaatctccttcggtaattgttccgacatattctccttgacggttcagcatcggaattgaagcgtatttgtgatgttccattgtctccagaacctgccgaagtgtacagtcatcataaacatatgcaacttcctgctttggatgtaaaaagaacaaaatattcattgcgtcacctctgtctttaaatttgtgtctctacaaaaatctggtaaagtgcacggatggcattcttaaaatcatcgtgtcttacaccgacaatgatattcagctcactggagccctgatcgatcatttttacattgatatgtgcatgggcgagtgcggagaaaattcttccggcagtaccgcgtgtagagcgcattccacgtcctacaatagcaatcagtgcaagatccgattccagttcaatgtgatctggatttacggccttatggatccctgcaagaacctgctgttctttttcttcaaactcatctttatgtacaaaaatggtcattgtgtcgataccggaaggcatatgttcaatagaaattccgtttttgtcaaattcctccaatactttgcggcagaacccgatttcagaattcatcattgctttttcaatggttacggcagcaaatccatcggttccggcaattccggtaatcgtatattttggctgtctgcaagtgccttccacgatcagagttcctttatcctgcggcgcattggtattgcggatattgattggaattccaaccttgcgaaccgggaaaatcgcatcttcatgaagtacagttgctcccatataggaaagttcgcgaagctcacgatatgtgatggtttcaatggattttggatttttgacaattcttggatctgcaatcaaaaatccggacacgtctgtccagttttcatagagatcggccatgactgcacgggcaaccagagaacctgtgatatcagaacctccacgagagaacgtaacgatcgttccatcctcttttgcaccataaaacccagggatgacagcaaattcttctccttccagccgaagtgcgagcaattcatttgttttctcatcatccagattgccgtcttcatcaaagcgaatgacttctgcagcatcgataaaacggaatcccagataatttgccatgatgatactgtttaggtattctcccctggatgcagcataatctcttccgatctttttgccgaaattctcacggatcacatcgaattcatgatccaatgaaagatccagttcaagtccatcgatgatttcgttgtatcttgcttgaatttcggacagaagacttgtgaatttcttctcacgaatagcaagattgtaacagctgtaaagcatgtctgtcacttttgtatcactggaactgcgttttccaggtgcagaaggcactacataacgccgagacttatctgcccggatgatatcccctacttttttgaactgctctgcacttgcgagagaacttcccccgaattttactactttcttcatcttctttcctccaactgtatatgatttcaaatcagatgcatcgatattgataaaacgcacgctgtatcatttcgctttcctattatacagtgtatttacgggattgtaaatcatagatttcaaaaaaaccgagtgcactccgaaaaatcagaagatcacatccgcatattgcgcacaagtcacggattttagatcatttggggcaatctgtatctgcattcccagttttcctccgctgacgtaaataaaatccaatgtctgcgccgtttcctggattgtggtaggaaatgctttcttcattccgactgcagtacacccgccccgtacatatc

(The sequence listing continues in the following parts.)

1.-93. (canceled)

94. A microbial consortium comprising or consisting of:
(a) Ruminococcus FBI01839, Parabacteroides distasonis, Blautia caecimuris, Longibaculum muris, Blautia massiliensis, Alistipes putredinis, Akkermansia muciniphila, Faecalimonas umbilicata, Clostridium scindens, Bacteroides cellulosilyticus, Eggerthella lenta, Monoglobus pectinilyticus, Gordonibacter urolithinfaciens, Bacteroides ovatus, Bacteroides thetaiotaomicron, Bacteroides uniformis, Phocaeicola dorei, Thomasclavelia ramosa, Lactonifactor FBI02339, UBA1417 FBI02365, Alistipes onderdonkii, Veillonella atypica, Raoultibacter massiliensis, Flavonifractor plautii, Extibacter hylemonae, Odoribacter FBI02593, Bacteroides stercoris, Enterocloster clostridioformis, Hungatella hathewayii, Scatavimonas FBI02887, Ruminococcus gnavus, Enterocloster bolteae, Blautia FBI02891, Bacteroides finegoldii, Luoshenia tenuis, Bacteroides caccae, Phocaeicola vulgatus, Parabacteroides merdae, Lacticaseibacillus paracasei, Oliverpabstia intestinalis, Faecalibacterium prausnitzii, Bifidobacterium longum, Bifidobacterium bifidum, Lawsonibacter asaccharolyticus, Bifidobacterium dentium, and Veillonella atypica;
(b) FBI01839, FBI01840, FBI01848, FBI01859, FBI01876, FBI01883, FBI01900, FBI01907, FBI01925, FBI01930, FBI01952, FBI01956, FBI01957, FBI02069, FBI02074, FBI02083, FBI02111, FBI02144, FBI02305, FBI02339, FBI02365, FBI02408, FBI02412, FBI02417, FBI02538, FBI02555, FBI02593, FBI02695, FBI02882, FBI02884, FBI02887, FBI02888, FBI02890, FBI02891, FBI02893, FBI02894, FBI02895, FBI02896, FBI02897, FBI02898, FBI02899, FBI02900, FBI02902, FBI02903, FBI02904, FBI02905, FBI02906, and FBI02908;
(c) Ruminococcus FBI01839, Parabacteroides distasonis, Blautia caecimuris, Longibaculum muris, Streptococcus salivarius, Blautia wexlerae FBI01866, Blautia massiliensis, Alistipes putredinis, Akkermansia muciniphila, Faecalimonas umbilicata, Clostridium scindens, Bacteroides cellulosilyticus, Eggerthella lenta, Monoglobus pectinilyticus, Gordonibacter urolithinfaciens, Bacteroides ovatus, Bacteroides thetaiotaomicron, Bacteroides uniformis FBI02083, Enterococcus avium, Streptococcus mutans, Bacteroides uniformis FBI02111, Phocaeicola dorei, Streptococcus parasanguinis, Streptococcus FBI02176, Streptococcus parasanguinis, Enterococcus gallinarum, Streptococcus gallolyticus, Thomasclavelia ramose, Bacteroides thetaiotaomicron, Lactonifactor FBI02339, UBA1417 FBI02365, Alistipes onderdonkii, Veillonella atypica FBI02412, Extibacter hylemonae, Odoribacter FBI02593, and Bacteroides stercoris;
(d) FBI01839, FBI01840, FBI01848, FBI01859, FBI01863, FBI01866, FBI01876, FBI01883, FBI01900, FBI01907, FBI01925, FBI01930, FBI01952, FBI01956, FBI01957, FBI02069, FBI02074, FBI02083, FBI02101, FBI02106, FBI02111, FBI02144, FBI02158, FBI02176, FBI02208, FBI02271, FBI02288, FBI02305, FBI02325, FBI02339, FBI02365, FBI02408, FBI02412, FBI02555, FBI02593, and FBI02695;
(e) Ruminococcus FBI01839, Parabacteroides distasonis, Blautia caecimuris, Longibaculum muris, Streptococcus salivarius, Blautia wexlerae FBI01866, Blautia massiliensis, Alistipes putredinis, Akkermansia muciniphila, Faecalimonas umbilicate, Clostridium scindens, Bacteroides cellulosilyticus, Eggerthella lenta, Monoglobus pectinilyticus, Gordonibacter urolithinfaciens, Bacteroides ovatus, Bacteroides thetaiotaomicron, Bacteroides uniformis FBI02083, Enterococcus avium, Streptococcus mutans, Bacteroides uniformis FBI02111, Phocaeicola dorei, Streptococcus parasanguinis, Streptococcus FBI02176, Streptococcus parasanguinis, Enterococcus gallinarum, Streptococcus gallolyticus, Thomasclavelia ramosa, Bacteroides thetaiotaomicron, Lactonifactor FBI02339, UBA1417 FBI02365, Alistipes onderdonkii, Veillonella atypica FBI02412, Raoultibacter massiliensis, Flavonifractor plautii, Extibacter hylemonae, Odoribacter FBI02593, and Bacteroides stercoris; or
(f) FBI01839, FBI01840, FBI01848, FBI01859, FBI01863, FBI01866, FBI01876, FBI01883, FBI01900, FBI01907, FBI01925, FBI01930, FBI01952, FBI01956, FBI01957, FBI02069, FBI02074, FBI02083, FBI02101, FBI02106, FBI02111, FBI02144, FBI02158, FBI02176, FBI02208, FBI02271, FBI02288, FBI02305, FBI02325, FBI02339, FBI02365, FBI02408, FBI02412, FBI02417, FBI02538, FBI02555, FBI02593, and FBI02695;
(g) Ruminococcus FBI01839, Parabacteroides distasonis, Blautia caecimuris, Longibaculum muris, Blautia massiliensis, Alistipes putredinis, Akkermansia muciniphila, Faecalimonas umbilicata, Clostridium scindens, Bacteroides cellulosilyticus, Eggerthella lenta, Monoglobus pectinilyticus, Gordonibacter urolithinfaciens, Bacteroides ovatus, Bacteroides thetaiotaomicron, Bacteroides uniformis FBI02083, Bacteroides uniformis FBI02111, Phocaeicola dorei, Thomasclavelia ramosa, Bacteroides thetaiotaomicron, Lactonifactor FBI02339, UBA1417 FBI02365, Alistipes onderdonkii, Veillonella atypica FBI02412, Raoultibacter massiliensis, Flavonifractor plautii, Extibacter hylemonae, Odoribacter FBI02593, and Bacteroides stercoris;
(h) FBI01839, FBI01840, FBI01848, FBI01859, FBI01876, FBI01883, FBI01900, FBI01907, FBI01925, FBI01930, FBI01952, FBI01956, FBI01957, FBI02069, FBI02074, FBI02083, FBI02111, FBI02144, FBI02305, FBI02325, FBI02339, FBI02365, FBI02408, FBI02412, FBI02417, FBI02538, FBI02555, FBI02593, and FBI02695;
(i) Ruminococcus FBI01839, Parabacteroides distasonis, Blautia caecimuris, Longibaculum muris, Blautia massiliensis, Alistipes putredinis, Akkermansia muciniphila, Faecalimonas umbilicata, Clostridium scindens, Bacteroides cellulosilyticus, Eggerthella lenta, Monoglobus pectinilyticus, Gordonibacter urolithinfaciens, Bacteroides ovatus, Bacteroides thetaiotaomicron, Bacteroides uniformis FBI02083, Bacteroides uniformis FBI02111, Phocaeicola dorei, Thomasclavelia ramosa, Bacteroides thetaiotaomicron, Lactonifactor FBI02339, UBA1417 FBI02365, Alistipes onderdonkii, Veillonella atypica FBI02412, Raoultibacter massiliensis, Flavonifractor plautii, Extibacter hylemonae, Odoribacter FBI02593, Bacteroides stercoris, and Faecalibacterium prausnitzii;
(j) FBI01839, FBI01840, FBI01848, FBI01859, FBI01876, FBI01883, FBI01900, FBI01907, FBI01925, FBI01930, FBI01952, FBI01956, FBI01957, FBI02069, FBI02074, FBI02083, FBI02111, FBI02144, FBI02305, FBI02325, FBI02339, FBI02365, FBI02408, FBI02412, FBI02417, FBI02538, FBI02555, FBI02593, FBI02695, and FBI02902;
(k) Ruminococcus FBI01839, Parabacteroides distasonis, Blautia caecimuris, Longibaculum muris, Blautia massiliensis, Alistipes, putredinis, Akkermansia muciniphila, Faecalimonas umbilicata, Clostridium scindens, Bacteroides cellulosilyticus, Eggerthella lenta, Monoglobus pectinilyticus, Gordonibacter urolithinfaciens, Bacteroides ovatus, Bacteroides thetaiotaomicron, Bacteroides uniformis FBI02083, Bacteroides uniformis FBI02111, Phocaeicola dorei, Thomasclavelia ramosa, Bacteroides thetaiotaomicron, Lactonifactor FBI02339, UBA1417 FBI02365, Alistipes onderdonkii, Veillonella atypica FBI02412, Raoultibacter massiliensis, Flavonifractor plautii, Extibacter hylemonae, Odoribacter FBI02593, Bacteroides stercoris, Blautia wexlerae FBI01861, Enterocloster clostridioformis, Hungatella hathewayii, Scatavimonas FBI02887, Ruminococcus gnavus, Enterocloster bolteae, Blautia FBI02891, Bacteroides finegoldii, Luoshenia tenuis, Bacteroides caccae, Phocaeicola vulgatus, Parabacteroides merdae, Lacticaseibacillus paracasei, Oliverpabstia intestinalis, Faecalibacterium prausnitzii, Bifidobacterium longum, Bifidobacterium bifidum, Lawsonibacter asaccharolyticus, Bifidobacterium dentium, Veillonella atypica FBI02908, and Enterococcus avium;
(l) FBI01839, FBI01840, FBI01848, FBI01859, FBI01861, FBI01876, FBI01883, FBI01900, FBI01907, FBI01925, FBI01930, FBI01952, FBI01956, FBI01957, FBI02069, FBI02074, FBI02083, FBI02111, FBI02144, FBI02305, FBI02325, FBI02339, FBI02365, FBI02408, FBI02412, FBI02417, FBI02538, FBI02555, FBI02593, FBI02695, FBI02882, FBI02884, FBI02887, FBI02888, FBI02890, FBI02891, FBI02893, FBI02894, FBI02895, FBI02896, FBI02897, FBI02898, FBI02899, FBI02900, FBI02902, FBI02903, FBI02904, FBI02905, FBI02906, FBI02908, and FBI02101;
(m) Ruminococcus FBI01839, Parabacteroides distasonis, Blautia caecimuris, Longibaculum muris, Blautia wexlerae, Blautia massiliensis, Alistipes putredinis, Akkermansia muciniphila, Faecalimonas umbilicata, Clostridium scindens, Bacteroides cellulosilyticus, Eggerthella lenta, Monoglobus pectinilyticus, Gordonibacter urolithinfaciens, Bacteroides ovatus, Bacteroides thetaiotaomicron, Bacteroides uniformis, Phocaeicola dorei, Thomasclavelia ramosa, Lactonifactor FBI02339, UBA1417 FBI02365, Alistipes onderdonkii, Veillonella atypica, Raoultibacter massiliensis, Flavonifractor plautii, Extibacter hylemonae, Odoribacter FBI02593, Bacteroides stercoris, Enterocloster clostridioformis, Hungatella hathewayii, Scatavimonas FBI02887, Ruminococcus gnavus, Enterocloster bolteae, Blautia FBI02891, Bacteroides finegoldii, Luoshenia tenuis, Bacteroides caccae, Phocaeicola vulgatus, Parabacteroides merdae, Lacticaseibacillus paracasei, Oliverpabstia intestinalis, Faecalibacterium prausnitzii, Bifidobacterium longum, Bifidobacterium bifidum, Lawsonibacter asaccharolyticus, Bifidobacterium dentium, and Veillonella atypica; or
(n) FBI01839, FBI01840, FBI01848, FBI01859, FBI01861, FBI01876, FBI01883, FBI01900, FBI01907, FBI01925, FBI01930, FBI01952, FBI01956, FBI01957, FBI02069, FBI02074, FBI02083, FBI02111, FBI02144, FBI02305, FBI02325, FBI02339, FBI02365, FBI02408, FBI02412, FBI02417, FBI02538, FBI02555, FBI02593, FBI02695, FBI02882, FBI02884, FBI02887, FBI02888, FBI02890, FBI02891, FBI02893, FBI02894, FBI02895, FBI02896, FBI02897, FBI02898, FBI02899, FBI02900, FBI02902, FBI02903, FBI02904, FBI02905, FBI02906, and FBI02908.

95. A microbial consortium comprising or consisting of the species or the bacterial strains listed in (a) Consortia 5.1 in Table 3, (b) Consortia 6.1 in Table 3, (c) Consortia 6.2 in Table 3, (d) Consortia 1 in Table 3, (e) Consortia 2 in Table 3, (f) Consortia 3, in Table 3, (g) Consortia 4 in Table 3, (h) Consortia 5 in Table 3, (i) Consortia 6 in Table 3, (j) Consortia 7 in Table 3.

96. A microbial consortium comprising:
(a) at least 39 bacterial strains selected from the group consisting of FBI01839, FBI01840, FBI01848, FBI01859, FBI01876, FBI01883, FBI01900, FBI01907, FBI01925, FBI01930, FBI01952, FBI01956, FBI01957, FBI02069, FBI02074, FBI02083, FBI02111, FBI02144, FBI02305, FBI02339, FBI02365, FBI02408, FBI02412, FBI02417, FBI02538, FBI02555, FBI02593, FBI02695, FBI02882, FBI02884, FBI02887, FBI02888, FBI02890, FBI02891, FBI02893, FBI02894, FBI02895, FBI02896, FBI02897, FBI02898, FBI02899, FBI02900, FBI02902, FBI02903, FBI02904, FBI02905, FBI02906, and FBI02908;
(b) at least 29 bacterial strains selected from the group consisting of FBI01839, FBI01840, FBI01848, FBI01859, FBI01863, FBI01866, FBI01876, FBI01883, FBI01900, FBI01907, FBI01925, FBI01930, FBI01952, FBI01956, FBI01957, FBI02069, FBI02074, FBI02083, FBI02101, FBI02106, FBI02111, FBI02144, FBI02158, FBI02176, FBI02208, FBI02271, FBI02288, FBI02305, FBI02325, FBI02339, FBI02365, FBI02408, FBI02412, FBI02555, FBI02593, and FBI02695;
(c) at least 30 bacterial strains selected from the group consisting of FBI01839, FBI01840, FBI01848, FBI01859, FBI01863, FBI01866, FBI01876, FBI01883, FBI01900, FBI01907, FBI01925, FBI01930, FBI01952, FBI01956, FBI01957, FBI02069, FBI02074, FBI02083, FBI02101, FBI02106, FBI02111, FBI02144, FBI02158, FBI02176, FBI02208, FBI02271, FBI02288, FBI02305, FBI02325, FBI02339, FBI02365, FBI02408, FBI02412, FBI02417, FBI02538, FBI02555, FBI02593, and FBI02695;
(d) at least 23 bacterial strains selected from the group consisting of FBI01839, FBI01840, FBI01848, FBI01859, FBI01876, FBI01883, FBI01900, FBI01907, FBI01925, FBI01930, FBI01952, FBI01956, FBI01957, FBI02069, FBI02074, FBI02083, FBI02111, FBI02144, FBI02305, FBI02325, FBI02339, FBI02365, FBI02408, FBI02412, FBI02417, FBI02538, FBI02555, FBI02593, and FBI02695;
(e) at least 24 bacterial strains selected from the group consisting of FBI01839, FBI01840, FBI01848, FBI01859, FBI01876, FBI01883, FBI01900, FBI01907, FBI01925, FBI01930, FBI01952, FBI01956, FBI01957, FBI02069, FBI02074, FBI02083, FBI02111, FBI02144, FBI02305, FBI02325, FBI02339, FBI02365, FBI02408, FBI02412, FBI02417, FBI02538, FBI02555, FBI02593, FBI02695, and FBI02902;
(f) at least 40 bacterial strains selected from the group consisting of FBI01839, FBI01840, FBI01848, FBI01859, FBI01861; FBI01876, FBI01883, FBI01900, FBI01907, FBI01925, FBI01930, FBI01952, FBI01956, FBI01957, FBI02069, FBI02074, FBI02083, FBI02101, FBI02111, FBI02144, FBI02305, FBI02325, FBI02339, FBI02365, FBI02408, FBI02412, FBI02417, FBI02538, FBI02555, FBI02593, FBI02695, FBI02882, FBI02884, FBI02887, FBI02888, FBI02890, FBI02891, FBI02893, FBI02894, FBI02895, FBI02896, FBI02897, FBI02898, FBI02899, FBI02900, FBI02902, FBI02903, FBI02904, FBI02905, FBI02906, and FBI02908;
(g) at least 40 bacterial strains selected from the group consisting of FBI01839, FBI01840, FBI01848, FBI01859, FBI01861, FBI01876, FBI01883, FBI01900, FBI01907, FBI01925, FBI01930, FBI01952, FBI01956, FBI01957, FBI02069, FBI02074, FBI02083, FBI02111, FBI02144, FBI02305, FBI02325, FBI02339, FBI02365, FBI02408, FBI02412, FBI02417, FBI02538, FBI02555, FBI02593, FBI02695, FBI02882, FBI02884, FBI02887, FBI02888, FBI02890, FBI02891, FBI02893, FBI02894, FBI02895, FBI02896, FBI02897, FBI02898, FBI02899, FBI02900, FBI02902, FBI02903, FBI02904, FBI02905, FBI02906, and FBI02908;
(h) at least 39 bacterial strains selected from the bacterial strains listed in Consortia 6.2 in Table 3;
(i) at least 40 bacterial strains selected from the bacterial strains listed in Consortia 6.1 in Table 3; or
(j) at least 40 bacterial strains selected from the bacterial strains listed in Consortia 5.1 in Table 3.

97. A microbial consortium comprising or consisting of bacterial strains or species having identical functions or substantially identical functions to the strains of the microbial consortium of claim 96.

98. The microbial consortium of claim 96, wherein each strain of the consortium comprises a 16s RNA that is at least 80% identical to a nucleotide sequence selected from SEQ ID NOs: 1-720.

99. The microbial consortium of claim 96, wherein each strain comprises a 16s RNA selected from SEQ ID NOs: 1-720.

100. The microbial consortium of claim 95, wherein each strain of Consortia 1, 2, 3, 4, 5, 6, or 7 as set forth in Table 3 comprises a 16s RNA selected from SEQ ID NOs: 1-720.

101. A pharmaceutical composition comprising the microbial consortium of claim 96.

102. A food product comprising the microbial consortium of claim 96.

103. The food product of claim 102, further comprising a prebiotic.

104. A method of treating a cancer in a subject in need thereof, slowing tumor growth in a subject in need thereof, or reducing tumor size in a subject in need thereof, the method comprising administering an effective amount of the microbial consortium of claim 96, a pharmaceutical composition thereof, or a food product thereof.

105. The method of claim 104, wherein the subject has received an immunotherapy.

106. The method of claim 105, wherein the subject has a tumor or cancer relapse.

107. The method of claim 104, wherein the subject is a non-responder to immunotherapy.

108. The method of claim 107, wherein the immunotherapy comprises an immune checkpoint inhibitor (ICI) comprising an anti-PD1 antibody, an anti-PD-L1 antibody, an anti-CTLA-4 antibody, an anti-BTLA antibody, an anti-TIM3 antibody, an anti-LAG-3 antibody, or a combination thereof.

109. The method of claim 108, wherein (i) the anti-PD1 antibody comprises pembrolizumab, nivolumab, cemiplimab, dostarlimab, retifanlimab-dlwr, tislelizumab, or combinations thereof, (ii) the anti-CTLA4 antibody comprises ipilimumab or tremelimumab, or a combination thereof, and (iii) the anti-PD-L1 antibody comprises atezolizumab, avelumab, durvalumab, or a combination thereof.

110. The method of claim 104, wherein the tumor or cancer is selected from prostate cancer, liver cancer, renal cancer, lung cancer, breast cancer, colorectal cancer, pancreatic cancer, brain cancer, hepatocellular carcinoma, lymphoma, leukemia, gastric cancer, cervical cancer, ovarian cancer, thyroid cancer, melanoma, head and neck cancer, skin cancer, and soft tissue sarcoma.

111. The method of claim 104, wherein the tumor or cancer is metastatic or malignant selected from melanoma, mismatch repair-deficient/microsatellite instability-high (dMMR/MSI-H) colorectal cancer, non-small cell lung cancer, renal cell carcinoma, head and neck squamous cell carcinoma, urothelial carcinoma, cervical cancer, and triple-negative breast cancer.

112. A kit comprising the microbial consortium of claim 96, a pharmaceutical composition thereof, or a food product thereof.

113. A method of manufacturing a microbial consortium comprising a co-culture method described herein, wherein the microbial consortium comprises or consists of:
(a) Ruminococcus FBI01839, Parabacteroides distasonis, Blautia caecimuris, Longibaculum muris, Blautia massiliensis, Alistipes putredinis, Akkermansia muciniphila, Faecalimonas umbilicata, Clostridium scindens, Bacteroides cellulosilyticus, Eggerthella lenta, Monoglobus pectinilyticus, Gordonibacter urolithinfaciens, Bacteroides ovatus, Bacteroides thetaiotaomicron, Bacteroides uniformis, Phocaeicola dorei, Thomasclavelia ramosa, Lactonifactor FBI02339, UBA1417 FBI02365, Alistipes onderdonkii, Veillonella atypica, Raoultibacter massiliensis, Flavonifractor plautii, Extibacter hylemonae, Odoribacter FBI02593, Bacteroides stercoris, Enterocloster clostridioformis, Hungatella hathewayii, Scatavimonas FBI02887, Ruminococcus gnavus, Enterocloster bolteae, Blautia FBI02891, Bacteroides finegoldii, Luoshenia tenuis, Bacteroides caccae, Phocaeicola vulgatus, Parabacteroides merdae, Lacticaseibacillus paracasei, Oliverpabstia intestinalis, Faecalibacterium prausnitzii, Bifidobacterium longum, Bifidobacterium bifidum, Lawsonibacter asaccharolyticus, Bifidobacterium dentium, and Veillonella atypica; or
(b) FBI01839, FBI01840, FBI01848, FBI01859, FBI01876, FBI01883, FBI01900, FBI01907, FBI01925, FBI01930, FBI01952, FBI01956, FBI01957, FBI02069, FBI02074, FBI02083, FBI02111, FBI02144, FBI02305, FBI02339, FBI02365, FBI02408, FBI02412, FBI02417, FBI02538, FBI02555, FBI02593, FBI02695, FBI02882, FBI02884, FBI02887, FBI02888, FBI02890, FBI02891, FBI02893, FBI02894, FBI02895, FBI02896, FBI02897, FBI02898, FBI02899, FBI02900, FBI02902, FBI02903, FBI02904, FBI02905, FBI02906, and FBI02908.

114. A method of growing Akkermansia muciniphila in a co-culture described herein.
